United States Patent Application Publication US 2024/0392374 A1 - sequence listing, part 3

SEQ ID NO: 520 - DNA, 17276 bp, unidentified
  source 1..17276: mol_type = unassigned DNA
tcaatcttctacttcaacaccccactgttgttttgcaagacgtttatagttattatatctccattttgcattatcctgagcagcttggaataattcggctgcttcgttcggatattgtttcattacagaagcgtaacgaacttctcctttcaggaagtcttggaatttatcccattgcggttctttgctgtctaatgtgaacggatttttaccttctgcctcgagcataggattataacgccacaaatgccagtatccgcattcaacagccgcagcttcttcggcctgagctttacccatacctttcttcaagccgtggttgatacacggagcataagcgataataatagaaggtccgtcgtaagcttcagcttcgcgaatagctttcagagtctgagcctgatcagcgcccatagcgatttgtgcgcaatatacataaccgtaagtagaagcgatcagaccgagatctttcttacgtacacgtttaccggcagcggcaaatttagcaatagctcccaccggagtcgctttagaagcctgacctcccgtattcgaataaacttcggtatccaatacgaggatatttacattcttaccggatgcaagaacatggtcgagaccaccgaaaccgatatcataagaagcaccgtcaccaccgataatccattgggatttcttgataaggtatttgctcaacgaagctatctctttacaaatctcacacttatcggctgctgcttttaccatcggtgtgattttagcttccagttcgatagaacgttcggtattttccttatcggcgatccattcggtaaacaaagtcttcatttcttcgggacaaccgccttcgatagcctgattcatcaacttaacgatacgttcacgcattttgtcaacggcaagatacataccgaaaccgaattcacagaaatcctcgaacaaagagttcgcccatgccggaccgtgacctttttcgttcgttgtataaggagtcgaaggaatagaacctgaatagatcgaagaacatcctgttgcattagcaaccatttcacgatctccgaacaattgagaaatcaatttcacatacggagtttcaccgcaacctgaacatgcaccggagaactcgaagagaggagtagcgaactgcgaattcttcacattagctttgatatctacaagatgctgtttgctcttcacgttattaacgcaatattcccagttggcagcttgaggcaattgagattctaaatcggtcatagccaaagctttaccattcttattacccggacatacgtcaacacagttaccgcaacccaaacagtcgagaacatctacctgcatacggaatgtcatgccgtcgaaagcttttcccaccgctttaagcatcgggaaattcgcacctgattgttctgccgcatcaagaacgaacgggcggatagaagcgtgaggacaaacataagcacatttgttgcactgtatacagttttcagctgtccataccggaacaaaagctgcgacaccgcgtttctcgtatttagctgtcccctgatgccaagtaccgtcttcaagacctttaaatgctgatacaggaagcagatctccatcttgtgcattgataggacgaacaacttcgttgatgaacgccggatcattgttcggaatcacttcatcatccggcagattcgcccatgcaggatctacagtaagttgtttatattcaccgccacggtcaacggcagcataatttttgtttacgacatcttcaccttttttaccgtaagattttacgatgaactttttcatctgctcgatagccaaatcgacaggaattacaccggtaatacggaagaacgcagattgcagaatcgtattggtacgattacccaaaccgatttcctgagctatctgagtcgcattgatataataaacgcttatgtttttctgtgcgaaataacgtttcactttattcggcaaatgctttgccaattcttcctcgttccaaatcgtattcaacaagaaagttccgttctcacgaagaccgcgagtcacatcatacatgcgcaaataggcctgcacatgacaagcgacaaagttcggagtatttaccaaataggtagaacgaatgggagtatctccgaaacgaagatgagaacaagtgaaacctcccgacttcttagagtcataagagaagtatgcctgacaatgcttatcggtattgtcaccgataatttttacggagtttttgttagcaccgactgttccgtctgcacccaatccgtaaaacttagcttcgaacataccttcgccgcccatagcgatttcttctttttgaggtaaagatgtaaaggttacatcatcaacgataccgatagtaaagttatttttcggcatcggcaaagcaagattctcaaatacggccagtatctgagacggagtagtatctttagaacccaaaccatagcgtccgcctacgatttcaggagcattttcttgtccgtagaacacatctttaacatccagatataaaggttctccggtagcgcccggttcttttgtacgatccagaacggcaatacgttttgctgttttaggaacagctgccaagaaatgttttgcagagaacggacgatacaagtgtaccgaaaccaagcccactttttcgcctttggctgtcaaataatcgatagcttcacgggcagcttccgttacagatcccatagcaataatcacacggtcggcatcttctgctccgtaataatcgaacagaccgtatttacgcccggtaattttcgaaatttcattcatgtactcttcaacgatagccggaacagcttcgtaatagttattacatgattctctgtgttggaagaaagtatccggattttccgccataccgcaagccaccggattttcggggttcaaagcacgattacggaattcttgaagagcttcctgatcgattagcggagctaaatcttcattttccaacatttctattttctgtatctcatgagaagtacggaatccgtcgaagaaattaacgaaaggtacacgagctttgattgtcgacaaatgagcgactccggcaagatccataacctcttgaacagatccttctgccagcatagcgaatccggtctgacgggtcgacattacatcttggtgatctccgaagatacaaagcgcatgagatgctaatgtacgagcagaaacatgaaatacacaaggaaggaattcccctgcaattttgtacatattcgggatcatcaacaacaatccctgagatgcagtataggtcgttgtcaaagctccggcctgcaaagaaccgtgtacagcaccggcagcaccggcctccgattgcatttcttgaactaatacggtttcgccgaagatattttttcttccggcagcagcccattcatccacgtattccgccatggttgaagagggtgtgataggataaatagcagctacttcactgaacatataagagatatgcgcagcagcttgattaccatcacaggtcaacattttcttttgtttggtcatattctaaatatatatttgagaatttaaaaatgcaattacaatattactgaaattaatataaaaatccgaacaaccacaatggaattttattctccctgccgatttcggtacgatctatcgtataataaatatcgggatttattcttcctcgtatattttcgctctctattttaaaattatatttctgattaacgaggaaatgcgtattcttttctcctttattcaatcggttatccttatgcaaggtattataaaagaatgtttcccgaaccgcctgttcctctacttgtgccggacgaatcgggtacatcagattcgtattgtgcatatataccattgccggtttcttgggaaattcctcatctacaggatatagcatattgataagccgggcatctttcagatatttgatatagttcacgactgtagccctcgatgtctgtatctccttgctcaactgactcacattcggagcagaaggagcattgaccgctaacagatacaaaagcttacgcactttcggcaaataagtaagttctatctgtttgatgaaaaggatatctacctccatcatcatattcatcgttttaatcaaattttccgaaaaattgcgcttttccagaaaaaaaggataaaaaccatgatgcagataatcttgaaaataagccaaaggtttcaccttattacatatttccgaggcaataaccgtatgattgcatagcaactcatccaattttaccgaagggaaatctgtccctgccatcagatttaaatattctctaaaagagaatcccctcagattataagaatccacgacacccgaaagcaaaggattttcttcttttaatcgcatcacagaagaaccggaaaaaacgatcttcaactccggaaaatgatcataacaatacctcaattcctctgaccaaccgggatacttgaatacctgatcgatcaacaatgtcttgccaccttttaccctgaattcgtcggcaaaatcgaccaatgtccgttccgtaaaataaaggtgattcagattgatataaaggcatgaacgatcgataccgaaattttccttagcatattggagcaaaaacgtagtttttcctaccccccgactacctttaataccgataagccggtgactccagtcaatctcttgcatcaattctctctttaccggagaatttacatgctctaccagatatttatgtgttctaaagaatgcttccacgctattgttctgtaagacgggacaaagataatgaaaaattgattttttgcaaagtagagattacaatttgtactattttttctgaaagtttttctcctctcctcccaaaagaaaaagagaagaaaatattacattttgtttgttttggtctatttttaatttcaaatgttcttttattcatcttattgagtttcaatgttttatttgccggttcgaatattaaaaaaatttgtgatttcaaacgaatcttcttcttcacggtaaaaacagaattgttttttcgaaactcctataacgacagatatttatctctactcacataatagtagagtctattcaaaatcacctgtttacgaatattttattcagttaaaaaatgtattcaaaacctcgctccgtatttattggtctatctttgtgtcaaatttaattatattaattatgaataagtttactcgaaaaatgatgcttgcaatcgcgtgtataattgcaggttgtataaatgttcaagcgcaataccaattgccgaatcccggatttgagggaacatggaaagaaacgacttggggaagctttctcggcaaatcgacagaaaacgttcctcaatattggcattctttcggaactgctgacggatcattacaaagttttacaaaagcctctgtttctcaaagtaccgacacccgtacaggatcaggtagttgcgcaaaaatctccgcaacaagtcctttaggcgtagtaggaaacggaacacttactaccggaagaatgaatgccggaagtgctactccggatgatgaaaccggaaactacaattttaccgaccctaatgatgaggaatatcaacaaaaattcaccggtcgccccgatgctatctcattttgggtaaagtcgaaaatggcaagctcgaccgaagaagcccggatggcagcaatattgcatgacaattttcgctatcaagatccgacaaaagacgagactattctcagccacaaaatcggatctgcagaattgaactatacaacgaccaatgaacaatgggtacaaaagactgttaattttgaatatactcaagatgctacaccctcattcttattactaactttcactacaaataaaactccgggtggaggaagtaaagaagatgttgtatatatcgatgacatcgaatttatctataactcaaaattggaatcattgaaaatcggaggtgtaacggttgacggatttgataaagatacctataattatacgataacaggtgacggagtcgttcctaccgaagaccaaatagaagccgtatcggacggtaaaggggcatcgatagaaactacaattaacgaaaatgtcgttacaatcgttgtaaagggaaacgattacagcgaaaacaatgataatactcatacgtatacgctgacttatcaagatactcgctctcaattatcttcgttaagtattaacggcatagcattagaaggattctccaaagacaaatatgattacaccgtcagcggagaagttcctacaaaagaacaaattattgcagaagctgacggaaaaggcgctactgtagatatagaaatcaacaaaaaagtagttacgattaccgtatcgggcagcaatatcgcaaccgatcccgaaaataaacatgtatatacgctcactttcgattatgaacagggaatcgaaaataacggaacaacggaaaatatgaaagtatatagtacaaacggaaatgtatttgttcaaggctatacaggtattgtcgagatttatcttttaaatggaggtaaagtcgctcaaaaagaggtatccggaaacagtatgttccggttagaaccgaacacttatattatccgcaccggaactaaagcgacaatggtaatagtaaaataaattttgtgtatatttataatagaaaaggcgtcaaatgacgccttttctattataaatatacttctcaacttttatagctatcaagaatctaatatctccttcttaaaagggaaaacttcaatacgacagaatctgctatcgagaacctgtttaaattttccaataaaaaatactacaaaaacattcgctctgattttttgggcttctttttgatctgtctctctataccaacacatcatacagttcgctatatttattatcgaaactgaaaaacacttttaaagaagctattcaaataaattgttaaaaaataattttgcaatgtatatattacaattatatactatttttgcaaagtcaagattgcaatatttatttaaatggaaacaaaagatctcaaattcggagaattagacgaaggttttaccataaaagaagccatagaagaagctaaacgatgccttaattgcaaaaaccccttatgtattaaaggttgtcctatcgaaaacaacataccgggatttattcatcagttatctatgggaaacatcggtgcagcgatgcacatcatcaatgaaaaaagtaatcttccggcaatatgcgggcgagtatgtccacacgaaaaacaatgtgtcggccattgtgttttgaatgccaaaaagcgtccgatacaagtaggaaagttagagcggtttgcggcagacttcgacggaaatatgggtttaatacgagacaaaataccccaaaaaacgagaggaaaagttgccgttatcggatcaggaccggccggtctgaccgtagcaggagatttggcaagagaaggattcaatgtcatgatttttgaaggagaacaagaagcgggaggagtactaatgtacggaatcccggaatatcggttacctaaagatgttgtgcgtaaggaagtaaaaaaaatcgaggctttaggagtaacgtttattacgcaatgtatggtaggacaaacaattacggtagatgacatgtttgaacaaggctttgatgccgtgtttatcggttcgggaacagcactacccaaatctctcgatacgccgggatctacattaaggggagtcacacagtcttcatattttctccgcatggcgagtttatgcaacaccggaagtataggaagggaagaagttcccgtaaaacaaggtgatatagtcggtgtcatcggagggggaaacgtagctatggatgctgcccgaacagcgttgcgtatgggtgccggaaaagtatatgtattgttcagaagaacaatagaccagatgagtgcattgcaaacagaatataacgaggctgtcgaagagggtgtcgaatttttatgggaaacgacagttaccgaatttatcggttctaacggtaaattggaaaagatcaagattaaaacaccggagagtgaaaagtttatgccgatagaccgtatcttattagcaataggatctcgtccggcaaataggatcgtttccacgacttccggtatagaggtcgacgacacaggatacgttattactaaagaacgtccttatggaatgaccacccgaaaaggagtatttgcaggcggtgatgtcgtacatactccacaaactgtcgttctggcaatgaaagaagcgaaacaggttgccaaaggtatcgctcaatttgtagatgctaaaaaacttttagaagaataattatttataatagtcaaaaatacggtcatattacattcattcataactaagagcccatttaaattttccaacaaaaaatatcatcaggtcatctctgtgctttttttccgttttttttatccgatagcccgctatcatccttataaaaacagaaaacagcctcaaaagaaaaccttaaaccgactaaacaagatttaaataggctcttaattataatacattagtaataaaacgattataatattaatatatgtaacgatcataaaattgtatgtgttgcataaattttacaattcttatatctttgtaaacaaagttcagagcttgttcaaattttgtacggacgtttttttgaaaaattgttttcgagggaatttttgtttcgataaggaatataacgcactacataacgtacagaaacaggaaaagcaaatcaaaaaaaagaccccaaaagtacggatatgcatccttatcgggaaatttaaaccggctcttattttattaaagatataaacgatgaaccatttttccgagaatttagcgcattttgtacatggcgcggcatttatgttttttatacttgcaagtattcagctatatcctttaagatatcgtagcaatatgatgagattacttttttatagcatgatctttcttgcttttcttgaattcaaggatatgggatttttgataaagggcgtatggtacaacccatatattacaagcataacaatgagtaccgacatgttatatgttccgttaatggctcttttcttctttgaagttatctctcccggatgggttacattacgcaggatcataggaatgtctatgccgtcggtactttttataatcgcatatatcatatacccatcggctgttatttttaaaaccgcgatgctatatgccctcgttttcggaacagttattaccgttatcgttttcatggcaagctctcgtcgcgataattacataaaaaacaatttctcggatatcgaaaacctgagtatttcatgggtacgcaaagcaataacggcattatatatatgccttgttctttggactattctcctttgggaagaaaattggctgagcgatgctgcttattatgcaatatctattatcgtttggacttatatttatcgattatctcaaaaacattcggttattgagatgccgaacacatccggattatttatgccgaaaacggaaaagaatgaatatcatgagatacctaattttcccttttgcaaaagattgagagaatatatggaaaatgaacgaatgttcctgaatcctaaactgactctcaccgaagtggctacagcaataggaacaaaccgtacctatttgtcggaatacttaaacaatgatctcggcacgactttctatgaatatgtaaacggattcagaataaaagaagcctgctccctactctcatcgaatgaacgcaaaactttagcggaaatagccgaattaagcggtttcaattctctatctacattcaaccgcgcttttattaaaagtatcggagaaactccagcccgatatctgaaaaaataccaaacgaaataacattttattctgtttttacaaaatgacttctttttttgttttaatgacacgataatttatttattgaatattctttttactgattgattttctgtacacttagagctattcccatatttgtcagactttaaagcctgtctaaattttccgataaaaatatttattcagacctttttattttttcgttctgttttcctgttcccgcatgtcccatagtctgcgccatgctctttatcggaacagaaaaacaccctcgaaaataaccgtaaaaaatgtatgtacaaatattgcgaccggcactcaaatccgaaatactgtttataaattcattaataataacccatacctaaattatcgcatgaagaagtatagttacctactgcttatctttctatccatttattttaccggatgtgaaaaagacgaaacaatagaagagctcgaagaagcgacattgtccgtttctcccgaaagtctgaatttcgacgaaaacaatccgtcaaataatcaaattacgattatttccaatgtttcatggaatataaatgtcagtaacaatgccttgaaaataaataaaaccgaaggcgatcccggagaaagcaaagtcacagtaacagatattcccgccggagagacttacatgcttacgatctccaccgtaaaaagaaacgagacggataaaacaatctcgaaaagcgttgccgtaactcgaaaactacaagatttcaccagcgaaaccgtttattatgacaatctcgacaaagcaacttggagcggaagcggaaacccctttatcgatcaatgggacggttatataaatgcaacgggaacgggtgccggaaatatcgaatacaccggacgaacagtctctgttcgaaacaattttcaatcttcaggatatacaggagcatctcgtaaaaacgcattctatttcggaggaaaggatgcttatgttacggtcaataatatagagcttcaacccggacaaacaaccttccaactttcgttcggttgttgcaaattcgaaggagatttcgatacatcttccaatatcaaagtatatatcagcggtgacggaagttcgatgaaacctctcacctacaatcgatctgcaacaaactcgtgggctctggcaacggctttgttcagcatacagcatacagttcccaaaacattatccattatgtttgtagccgatgagaacaatattaggatggatgatatcaagctggtgacaagtaatcagccgacagaacaaatattcgatttttccgggatcaattacctgtgtgcagaaacacctaaaaccattaaggcaaatgacaattataaatacgttacacatttcgcagaaacattgacaagccaaaagcatgtgcgcaactatacggcatgttacgacacatatcgacacaatcccatgtgggtcgcttatcctgtacaccaatgttatcatgaaaaagggttcggacgtacaaatccagatccttggcgtcccgacccgaaattctcggcaagtgagcaatctattatctatccgagcgactggagtaactggccttggacagcaaatggcaatgaaccgactgattcgtattattattggacaccttataataacaggaattttaccaaaggacacctgttgcgctcggccgaccggggaggagctgaaagtgaaatgaacatacaaactttttatcctaccaatattgcccccgaagcgtatctttacgaagagcattggagcaaagtcgaagaattgttatccgatacatgggaatgttccgatacgacatacgttgtcacaggatgctattatgcggacaatagttacaaaacatacgatgcgagtaattgggacaatcaatcggctttatccaaagagtgcataattcctacagctcgatataaagtaatacttcgtactaaaagcgggagttcaggcaagtcgattgccgaatgttcatcggaagaagtaatggctatcggtttctggtttccgcaaaatcttaataacgaaaacccgaacacgactcctccattgagtaactatatatactcagtatccgaaatagaacaaatgatcggcggtgaattcgaatttttcccgacagtacctaccgaagttaaaaatcgagtgaatatcaatgactggccgggactaaattaaaggctaaatcgaattttctaacaaagaaaatattatcagtttttttacgttttcttccgagctgtttcattgtttctattcgtcaatagctcgcgaaacataactgagcaaaattgagacgacaagctccaaaactctatcaatgaaaaggcctgcccgacgaatccgaaatgtcgggcaggccttctttatatatcggtcaacaaaaaccctaaaagcctgtctaaattttccaacaaaaaaatattatctcccccaaaaagcatatccattgtccggataataacatcttctcgatactgtatcgaattttataaaaaacatatatcccttattatcaaattttctctatttgaaaaagacaagaacagacaatcgttcagcatgaagcagtagtttctaaaagaaaaataaaacctgcacttcaataaaatgcaaaaagtgacatataaaaaaatggttgtctcccgacaaccaatcttcgttaaccttaaatctaatactatgaaaaacactgtgcaaatataaagaaaatatgttatacaacatattaattgctaaacaaaatattttgtattaactttatttaaactttaaatcattcactacgagtccgtttagattctgtctaaattttgctcgggtcagttttgagagtttctttcgaggatatttttctgttttcaggaagaggatagcgggctatttgacgagggaaaacgggaaaacagaccggaagaaaacacaaaaatgacctgataatatttttttgttggaaaatttagacaggctcttagactttcaaattctatgtaacaaaatttagagcctgttttaaattctcaaataaaaaatttaagcaggctctaaatcgaaacaaataaccatttatacataataaaaatatagcaaaagatgatttttaaccgatatttttcacgattcagcgataacaattcggattttatcgatttttttttgcacaacaatttttctattttatttttgtaacgatcaaaaaagcatatactacctgtacagaatgattttttgattaaactattctatatattttggttactcgacagccattccgtgaggaaaggctgttgtttttatatttcaaagcaacaccgcaacaccaaaaaatcaaagacaacctatcaatcttaatatttcagcaggagaatccacaatatgacaagctccgttttctatcaattcttcacgagagcgaaacccccatgtcacacctacggaaataactgtcgccgctgcagccgtttgcatatctacccccgaatcttcgacatataacgtctctctttccgatacaccgtttactcgaagtatctccttcacgatggtcggatctggttttaccggaattccctcacgctgaccgaatatagcagaaaaaacgatgtctttaaaataatgatgtaccagcttttctgttccttcctgatacttattagaagcaacagccaaagccattccttcatgatccaattctctcaacaattcggggatacccggataaggaactgtcaaacacgtattattttgagtataatgttctaaaaagaaagctctcatccgtcctatattttccgatgtacgttcgccttccggaagtgctcgttcaaaaagtttatttatcccgtttccgacaaaataattataagcatccgtttcgtgttcaggaaaaccacattgccttaatgcataattggtactccccgccaaatcacgaatcgtattcagcaaagtaccgtccagatcaaatattaccagctttatcatcttcttctgttttttatggaacgaaagtaaaaaaaatagatttactatacaaaccgcttctttttatgttttacagcatagtcaattcatatatctatacaaataaaacattaataatcaacatattaatattataaagccattaatgtgtacgcacacacaataaaaaatattataaatacccgatatttttcgctacatttgcaaatcacaaatgtgtacgcacacacaacataaaattgctcatgaccgataaaacaaaaaatgttcgcatttcagatattgcccgtatggcaggagtatcagtcggaacagtcgacaggattctgcacaacagaggaaaagtatctaaagcggctcaggaaaaagtaaaccaagtactacgagaggtcgaatatcgtcctaatctcatggctcggtcgctggctttgaaaaaacaattcaatatcgccgctttgattccggcttttcgatcgggagagtattgggaaaaagctgcagaaggaatagacaaagctgcaggtgaactgaacgattataatgtcgtcgtcgaaaaaatattttttgaccaatatgaccaatcttcatttgaacaagcttgtaaaacggttctttcaaatgaatttaacggagtgttgatcggaacattgttttcggattcggtaaccgaactttcggcttgtctcgatgagaaacagatcccatacgtgtatatcgattccaatattccagaaaacaatcaactggcatatttcggaactaattcttatgacggaggctatattgccgcaaaactgcttaccggaaaaatagcacaaggaagcgatattcttatcgggaaaatagtccgagaacgaaacaacagttccactcaggtaaaaaatagagaaaaaggttttatggaatatctccataaaacaggatttaccggtcatgttttcttttgcgaactgcatatcgaagaacctgaatataacgaaaaagtcttagataaaatattcaaagctaatcccggcataaaaggagctgtcgtatttaattcggtatgttgtgtattggccgattacttagagaagaagagcaaaaaggagataaagctggtgggatatgaccttattgaaagaaatatacggcatctttcggaagggacaattacatggcttatcgcccaacgtcctgagatacaaggctacaacgggataaaagcgttaggtaactttttgacatacggaaaaaaaattcctcgaatcaactttatgccgatagatattctcattaaagaaaatatcggttactatcaaaataataatctttaaaaatttaatattacaattatggcaaatctattcagtgttaaagacaaagtagtggtaatgaccggagctgccggtattctcggccgtacgatatcttcatatcttgccggagaaggagcaaaaatggttatcctcgaccgtaatgaagaagcgggaaacgaactggtgaataacattaaatctgcaggaaacgaagctatatttctatataccgatgtactgaacaaagatgttctattgcaaaataagaaagacattatcgccaaatacggtcgtatagacgtattgcttaacgcagcaggaggtaacatggcgggcgctacgattcctcccgaaaagacgattttcgatcttgatgtagaagcttttagaaaagtcgtcgatctaaatcttttcggtacggtattgcctacaatggtatttgcagaagagatggcgaaacagaaagaaggggctatcgtaaatttcagctccgagtcggctctacgtccactaactcgtgtcgtaggttatggcgcagcaaaagccgcaatctcgaactttaccaaatatatggccggtgagctggctctaaaattcggaccgggattacgtgttaatgccattgctccgggatttttcctgactgaacaaaatcgcactttattaactaatcccgacgggtcgctgacagaccgttcccgtgttattcttgcccatacaccgttcggacgcttcggcgaacctgaggaacttgtcggaactatccaatacctgatcagcgacgcttcaaaattcgtaagcggaacggtggctattgttgacggaggattcgacgctttttcgatttaagtacccatttaaattttctgataaaaattacaaatatgattttatgtgaacagacatggcgctggtatggtccgaatgaccctgtcagcctgcaagatataaaacaagccggagctaccggaatcgtaaatgctctgcaccagattcccaacggagaggtatggacagtggaagagatcatgaaacgcaaaaaaatgatcgaagatgctggacttaaatggtcggtcgtagaaagtgttccggtacatgaacacatcaaaactcaaaccggagattttcagaaatatatcgataattataaagaaagcttgcggaatcttgccaaatgcggcatatatatcgtaacttacaatttcatgccggtactcgattggactcgtaccgaccttgcctatacaatgcccgacggttcgaaagccctgcggttcgaacgtgcagctttccttgccttcgacctttttattttgaaaaggccgggtgctgaaaaagagtattccgatgaggaaaaagccaaggcaaaagcccgttatgagcaaatgagtgaagccgacaaacaattgctggtacgcaacatgatcgccggacttccgggatcggaagagagttttaccgtagaacaatttcaggaagctctcgaccgatataaagatatcgatgcagaaaaactacgtgccaatctgatctatttcttaaaagaaattactcctgtagccgatgaggtcagtgtaaaattagtcattcatccggatgatcccccctatccgattctggggttaccgagaatcctaagtactgaagaagattttaaaaagctgattgaagccgttccgaatgaatcgaatggactttgcttgtgtaccggctcattcggtgtacggggagataacgaccttgccggaatgatggaacgtttcggagatcgtatcaatttcgtccatttgagaagtacacaacgagatgaagaagggaatttttatgaagcgaatcacctcgaaggaaatgtagatatgtataatgttatgaaaaacttcttgctgttgcaacaacgtagaggcgtttccatacctatgcgtcccgaccacggacaccagatgatcgatgatctccataaaaaaaccaatcccggatattcttgcctgggtcgtatgcgcggtttagcagaattacggggattggaaatcggtatcgcaaaatctttgtttaaataa

SEQ ID NO: 521 - DNA, 6708 bp, unidentified
  source 1..6708: mol_type = unassigned DNA
ttagtaggtgatgccctgagccatcatagcggtggcgaccttcaggaagccggcgcagtttgcaccgaccatcaggttgccctcggaaccggcagccacagaagcgtcgtaggaagcgtggaagatgccctccatgatgcccttcagcttggcatccacttcctcaaagctccagctcagacgctcggagttctggctcatctccagaccggaggtagccacgccgcctgcgttggaagcctttgcgggtccgtacaggatgccgttggacaggtagacctcgatggcctccggggtgctgggcatgttggcgccctcgcacacgacggtgcagccgccctttaccagagcctcggcggactccttgttgatctcgttctgggtagcgcagggcagggcgatgtcgcaggggacagtccagaccttggtgcagtcagcaacataggtcgcatccttgtgggtctcagcgtactccttgatgcggccgcggcggacttccttcagatccttgacgtaggccagatcgatgccgttggggtcgtagacatagccgttggagtcggacatggtgacgaccttggcacccagctgggtggccttctcgcaggcgtagatggcgacgttgccggagccggagatcaccacggtcttgccctcgaagctgtcgttgcgcatacacttcagagcctcagcagtgaagtagcacaggccgtagccggtggcctcggtacgggccagagagccgccgaaagtcaggcccttgccggtgagcataccgccctgaaaactgttggtcaggcgcttgtactggccgaacatatagccgacctcgcggccgccgacgccgatgtcaccggcggggcagtccacgaactggccgatgtggcggtacagctcggtcatgaagctctggcagaagcgcatcacttccatgtcgctcttgccgtgggggtcaaagtcagagccgcccttgccgccgcccatgggcagggtggtcaggctgttcttgaaggtctgctcaaagccgaggaacttcaggatgccctgattgacagaggggtggaagcgcaggccgcccttgtaggggccgatggcgctgttgaactggacgcggtagccgcggttcacctggaccttgccctgatcatcgacccaaggcacacggaaggagatgatgcgctccggctcgaccagacgctcgatgaggccggccttctcgtactcggggtgcttctccacgacgggctggatgctctccagcacctcgcggacagcctgcaggaactcaggctcgttggcattgcgcttctcgaggccctcgtagacacgcttcagatattcattcgtcagcatagtaagatactccttttcccttaactctatcgtgtagctctatcatgaggccccggctctcccgtttccacggcgaggacagcgaacctcagcacacttcgttattataaagctttatccgcagatttacaagatggcccgccctgcaaaagctggaaaatctttcaaaaaagctgcagaaaagatgaacatacttcacaaaaaagaacgggtgcttcaaaaaacggcgataacgcctgattttgcgaaagaataaaaatccccctgcaccggcccgggaagggcggtgcaggggggataagtcttacttcagcagcttctcgcaggcgtcagcggcaccctcgaggaactgtccgccgtaggtctcgatcatgccggcgtcggacagtgcggccagctgggggtcgatggggcacttggccagcacgggcaggtgatgctttgcggccacctcgtccacatggctgtcgccgaacacattgatgtgcttgccgcagtcggggcagacgatgtagctcatgttctcgacgatgcccagcataggcaccttcatcatctcggccatgttcacagccttggcgacgatcatgctcaccagctcctgcgggcttgccacgacgacgatgccgtctacaggcaggctctggaagacggtcaggggcacatcgcccgttcccggaggcatatccacgaacaggaaatcgacgtccttccagaccacatcggtccagaactgcttgaccgcaccggcgatgacggggccgcgccagacgacggggtcctcttcgttctccaccagcaggttgatgctcatgacgtcgatgcccatccggctctggatgggccagcagcccttgtcgtccgccatggcgcggccatggatgccgaacagcttcgggatggacgggccggtgatgtcggcgtcgaggatgccgcagtggtagccgcggcgtgccatggcgcaggccagcagggcgctggtcatgctcttgccgacgccgcccttgccggacacgacgccgatgaccttcttgacgctgctgttagggttgggggcgtcatgctggggtgcagcattgcgggaagaacacgctgccccgcagttggagcagtcatgggtacattcttcgctcattgtctcattgcgcacggccgtggtgccggggtgcgcttcctccttgcattcttagatcctgtctggcagaaaacgctccgccagatgcaatatatatcatatcataaaactgggaaagaaacaacccacgccgccgctcatatttcccagagcggcgtgcatacctataaaaggatacgagcaggaaagggagggggcgcagtggggaagagctatctgaaaaacgcggccctgatgaccggagcagatgtcctgctccggctggcagggatggggctgcgcatctggctggcgaacgcgctgggcggcgaggggatggggctgtatcagctggtgctggcggtctactcgcttttcgtcacgctggcgacggcaggcgtatcggtggcggccacccgcctgatggccgaagagctggcccgaagcccggccgaggcccgggggatgctgcgccgtcttctgctggcgggggccgggctgggagtgacggcgttggcggcccagttcggtctggccggcctcgccgcacggtggtggctgggagatgcccgggcggcgggggcattgcgcgtctcgtcgctgggcctgccgtggatggcggtgtcgtcggtgctgcggggctttttcatcgcccgacggcgggtcgagccgaatgtcctgagccagctggctgagcagaccgtccgcatcggcatcgtctggaccgcgctgggccgggccgacgctctcggatgggatgcggggcagcgctgtacggcagtgctgggcgcaacggcggccagcgaggccgtcagcgccggtctgatggccctgttctactgccgggaggcccgccgatgcttcggctcacagcctgtacagcgtccccatgacccggggcggcggctctgggacatcctctggccggtggagggcgggcgatgtctcgccagtgccctccacaccgccgagaatatgttggtcccagcctgtcttgcggtctatctgcaatgctccggcgggcgtgccgaggctgtgacccagtacggaaacctgaaagggatggccctgcccctgctgacctttcccttcgggctgctggggagtctgtccgtcctcctgatgcccgagatcacccaagcccatctccgggggcagagcaggcgcctctccgtcctcatcgaccggatgctgcggctcacaggctatttttcggcgctggcgggggcagcattctgggtgtggggacagccgctggccgaggcactctacggcagcgcggaggcgggcagctatctcgtcatcctcggcccggccatgccgctgatgtacctcgagagcatggtggacggcgcgatgaaggggatgggagagcagaaagccgtcttccggtatagtatgtgggactcctgccttcgcatcgcgggggtggtgctcctgctgccccggttcgggatgaaggggtttctcttcgtgatcctgctgtccagcctctacacctgcgccgccaacaccgggcggctgctgtccagctgcggcctgccgctgcgactgtggcggtggctgggggcgccgggtcttgcggggacggccggtgccggagcggggctggcgctgcggaagctcctgaccccatggctggcgagaggagtgcccgcgcagctggcggcggtggcgctgggcggtgcggggatgacgctggtctgctttgcggcggcatggccgctgggcctcggcgaggagctgcgggacgtggcggcaggggagagaagacacaaaagcgctggacatggggagaagaatcgagtataatgatacagatacgatggggcgataggcccttgggtcgaaaaaacggcggctggcgtctctccgacaccggccctgatgcaaaagaggactttttgtgaaggaaaagaaaacaagtatgctgcaggtgctggcccgccgggcctttctggtggtgctggacgcagccatcgtagccttcagcttttattttgcgctcctgctccgcgcagacggcgcagtcgaggcctcgtggtggcctcacaaccgtgccctgctctacgcgaacctgccgtggatcgtggcggtctatctgctcagcttcttgggcgggaggctctacaccatcctctggaaatacgccggagagcgggacctcatccgtctggctgggatgatcgctgccccgacggtcgtggtgtatctggtcaaccgctgcttcatccatggcgtgctcttcaactcggccaacgcgatggcttcggtgctcatcttcctgctcgtcggcgggagccgtctggcgtggcggctcttcctgaaccacccgctgggcgagcggctgcggggcaataccagcaaagaccccaaccgccctgtgatgatcgtgggcgcgggcgaggccggtgcgtgggccatcaacgtctgcaagagcaacggcagctacggccacccggtggtggcggtggacgatgaccccgccaagctgggccagaccatccacggcgtcccggtgaagggtacgctggaggagatccccgacctgtgcacccgctacagcatccacaccatcatcattgccatcccgaccctgcggggcagccgcctgaaccatgtcatcgacctctgcgtctccacccactgtgcggtgcagatgctcagcgacccccagcttgtgggggcaggcgcaccccagcagggggcgttccgtgagctgaataccgccgacttcctctcccgtgaggaggtcacgctggacacggcccagatctcgggctacctcaccggcaagaccgtgctggtgacgggcggcggcggcagcatcggcagcgagctttgccgtcaggtcatgcgcttcagacccgcgaagctgctcatcttcgatatttacgagaactgcgcctacgagctgcagatggaactgcagcagaagtatggccgcgatgtgcccatcacggtgctggtgggttccatccgggacaaggcccgtctggacgaggtctttgagacctaccaccccacggtggtgttccacgccgcggcccacaagcacgtcccgctcatggagatcagccccgccgaggccgtcaagaacaacgtcttcggcaccaagaacctgctggtcagtgccagcgagcacggcgtggagcggctggtgcagctttccaccgataaggccgtcaaccccaccagcgtcatgggctgcaccaagcgcctgtgcgagatgctcatccagacctttgcgggcaacaccgacatgaagtgcgtggccgtccgcttcggcaacgtgctgggcagccacggcagcgtcatcccgctgttcgaggcgcagatcaaaaagggcggccccgtcaccctgactgaccccaacatcgagcgctatttcatgaccatcccggaggccgcacagctggtgctgcaggccggcgcattggctgagagcggcagcatctatgtgctggatatgggtgagccggtcaagatcatggatctcgcaaagcagctcatccgtttctacggctatgagccgggcgtgaatatggacatcaagatcgtgggtctccgccccggcgagaagctctacgaagagctgatgatggacgaggaacaggacaagatgcgccgtaccggccacaataagatcttcgtggctccgccccggagcatcgaccttggcgagttctatcagcagcttcaggagctgtctgccgccgccgagcacaacgacgacaacgtcgtggcccagctggccaagatggtgcctacctttacccccacccgggagaacctcaagctgtgaactgctggctgcacggcattcggccgtgtaaaaatatatgagagggatgtatatcatggaaaagaaaccgtttttgactgagtcgatggctcaggacatcattcaggacgtgcccacccccttccacgtctacgacgagaaaggcatccgggagaacgcccgccgcatcaacaaggccttcagctggaataagggcttccgcgagtatttcgcggtcaaggctctgcccaaccccgtcatcctccagatcctgaaggaagagggctgcggcgtggactgctcctccctgaccgagctgatgctcagtgaggtgtgcggcttcagcggcagcgacatcatgttctcctccaaccagacccccgtggaggacatgaagaaggcctacgagctgggcgcttatatcaacctcgacgacgccacgatggtggacttcctc

SEQ ID NO: 522 - DNA, 10367 bp, unidentified
  source 1..10367: mol_type = unassigned DNA
tcagtcctcaaacaggggcttcataaagggcaaaaagtccagcgttgcaaagtaatcgcgaggggtctgggcgcggcggatcagccggtgagagccgtcctcacacagcagcacctcggcgcagtgcagcttgccgttgtagttgtagcccatagcggagccgtgggcaccggtatcatggatgtaaaggatgtccccgatgtcgatcttgggcagcatccggtcaacggcaaacttgtcgttgttctcgcacagaccgcccaccacgtcgtacttgtggtcgcagggctcgttttccttgcccagcacggtgatgtggtgataagcgccgtacatggcggggcgcatcaggtttgcggcgcaggcgtccagaccgatgtactccttataaatgtgcttttcgtggatgacggtggacaccagtgcgccgtaggggccggtggtaaagcggcccatctcgctgaagatggccacatcgcccatgccggcgggcacaaggatttcctcaaactttttgcgcacaccctcgccaatggccatgatgtcgttctcggtctgctccgggcggtacgggatgcccacgccgccggacaggttgatgtagctgatgtgcgcaccggtagcctgctgcacccggacagccagctggaacaggatgcctgccagctccgggtagtaggcgtccgagatggtgttggaggccaagaaagcatggatgccgaactgctttgcgcccttctgcatcagctttttgtagctgtcgatcatctgctgctcggtcataccgtacttggcatcgccgggcttgtccatgacctgaaagccctcttcgctctcgcccagctggaaggtcccgccggggttatagcggcagaagatctcctgcggcaccccggccacccgctccagaaactccaccatggtggcgtcgtccagattgatgtaggcgcccagctcgtaggccttctgcatatcctccacaggggtctggttggaggagaacatgatctcgtggccggtaaagccgcaggcctcgctgagcatcagctcggtcagggaggagcagtccacgccgcagccctcctccttaaggatctgcaggatgacagggttcggcagtgccttgaccgcaaagtactccttgaagcccttgttccagctgaaggccttgttgatgcggcggacattctcccggatgcccttctcgtcgtagacgtggaacggcgtgggcacatcctcgatgatctgctgtgccatcgcctcggtcagaaacggtttcttttccataataacatccctctcgttttgcgcagcccggcatgttccggcctgcggtctatcccatgcggcccagtgccgcaattcaagctgttacagtttcaggttctcccgggtgggggtaaaggtggggatcatggccgccagctggcgcaccacaccctcatcgttgtgggcagcagcggcttccagcgcctgcagctgctcgtagaactcggccagatcaatggtgcgggggcttgccacaaagatcttgttgtgctgggtgcggcgcatcttgtcctgctcctcgtccatcatcagctcttcgtaaagcttttcaccggggcgcaggcccacgatcttgatctccatattcacgcccggctcgtagccgtaaaagcggatgagctgcttggccagatccataatgcgcaccggctcgcccatatccagcacatagatattgccgctttcggccagcgcacccgcctgcagcaccagctgggctgcttccgggatggtcataaagtagcgcacgatgttggggtcggtcagagtgaccggcccgccctttttgatctgcgcttcaaacagcgggataacgctgccgtggctgcccagcacattgccgaaccgcactgccacacacttcatatccgtgttgcccgcaaaggtctggatgagcatctcgcagatgcgcttggtgcagcccatgacgctggtggggttcacggccttatcggtggaaagctgcacaaagcgctccaccccgtgctcgctggcactgaccagtaggtttttggtgcccagcacattgttctttacggcctcggcggggcttacctccatcagcggcacgtgcttgtgcgccgctgcgtggaacaccaccgtggggtggtaggtatcaaaaacctcgtccagacgttttttatcccgaatggagccgatgagcaccgtgaccgggatatcgcggccgtacttctgctgcagttccatctgcagctcgtaggcgcagttttcgtagatatcaaagatgagcagcttgccgggcttgaagcgcatgacctgacggcacagctcgctgccgatggagccgccgccgcccgttaccagcaccgttttgccggtgaggtagccggagatcttgtcggtatccagcgtgacctcctcgcgggagaggaagtcggcggggttcagctcgcggaacacctcctgctggggtgcgccgctgcccaccagttgcgggtcactgagcagctgcaccgcgcagtgggtgctgacgcacaggtcaatgacatggctcagcttgctgccctttaaggttgggatggcaatgatgatgctgtggatgccgtagcggttgcacagctccggaatgtcctccagcgtgcccttgaccggcacgccgtggatggtctggttcagctttgcggggtcatcgtccaccgccaccacggcgtggccgtattccttgttggatttgcacacattgatggcccatgcaccggcttcgcccgcacccacgatcaacaccgggcggttggggtccttggcgggcactttgcgcatccgctcacccagcggatggttcaaaaacagccgccaagccaagcggctgccgccgatgaacaaaaagatgagcaccgaggccatgcagttggcggaattgaacagcacaccgtggataaagcggcggttcaccacatacaccacggcggtgggcacggcgatcatcccggcaaggcggatcagatcccgctcgccggcgtacttccacagcaccgagtacagcccgcccgccagaaagcagacgatatacaccgccacgatccacggcagattttcgtacagcagtgcgcggttgtggggccaccacacggcctccacggcaccgtctgcccgcagcagcagggcaaaataaaagctgaatgccacaatggctgcatccagcagcaccagcagcgcacggcgtagcagcacctgcggggtattcttggttctatctttcacttacgatcctctttttccctctcagcgccaagggtttgccctgcgctgctttttcggcagtgttctcccccggcaatgccggaaggatacaactacacgtttgtattatactcacaatctccgcctgtgtccagaaaatttacgtttttatcactttcccctgtttttcccggtctttgcctgccgcagcaccgcccgcagctcctcccaaagccccagcggcagcgccgccagcaaaaacacgatggcagtcaccgtgccgcccgccgtcagcactgccagctgttcccacagcccctgtgccggaaagcccgtcagcacccggcgcacaccccgccctgccgcaccggcagcggcagcagccagcagcggcgcacccagccagcggcggaaagcgtgccctgtaccgctggaaagcagcagccgcccggtgttggccgcgcaggtgtaaaagctggaaagtaagatcaccgtcagaaagccccgcatcccgtaccggggcagcagcaccgccaccccgccaatgcgcagcaccgcgtcccacacgctgtaccggaaagcggccttctgctccccgatgcccttcatggcgccgtccaccatgctttccagatacatcagcggcatggccggggcaagggtctccagatagaacccggcctccgggctatggtagagcagctgcgccagcggcctgccccacacccagaacagcgtgcccgccagcatggagaagtatcccgtaagccgcagcatccggtccagcagggcgttcagccgggcggtctgcccctcgatatgcgcctgcgtgatctccggcatcagcaaaacagccagactgcccagcagcccaaaggggaaattgagcagcggcagcgccatgccctttaaggtgccgtactgctccagtgcagcggtgcgcccgccggaagcccccagatacaccgcaaggcaggcgggcaccaacatattctcggcggtgtgcagcgcgctggaaagcaccctgccgccctccaccggccacaggatgtcccacagccgccgggacgcctcccttggcgggcgcggcgctgtgctgccgaagcagcgtgccgcctcccgccggtaaaacaatgccatcagggcggtggatatggcctcgctcaaggcggtggcagccagcaccagcgcacagcgactgccgtccggccagccctgcgtgcgggaaagcgcccacaccaccgcggcaatgcgcaccgtctgctctgccagctggctgagcacgttgggttccacccgccgccgtgccagaaaaaagccgcgcagcactgccgagacagccatccatggcagtcccagcgccgaggtgcgcagcgcggcagcggcgcggatatcccccaaccaccattttgccgcaaggcctgcggtggcaagctgggcggccatggcaagcccgcccagcgtaagccctgccagcaccagccgcaccagcatcccgcgcgcagcggctttatcccggctgagctcctcggtcagcagccgggcagcggccaccgagatgcccgccgtggccagcgtgacgaacagcccgtacaccgccagcaccagctgatacagccccatccccgccccgcccaaggcgttggccagccagatgcgcagccccatgccagccagccgcagcaccacgtccgagccggtaagcagcgccgcgttcttaaaataactctgccgcaccctgcacctccccctgccccggaacgggcgttcacggttcagcctatgcggcagctttgcaaaacatgagcggcgctatgggttgtttctgcgcactttttatggtatagttaacagtggtcaggcagggcgcaagctccctgcctgtattttgagcaaggaggaagcgcaccgcccgggtcctgcccctgccgtgcgcgacaaagagaatgagcgaagaatgtacccatgactgctctaattgcagtgcagcctgttcttcccgcgatgccgctccgcagcacgatgcccccaaccctaacagcagtgtaaaaaaggtcatcggcgttgtttccggcaagggcggcgtgggcaagagcatgaccagcgccctgctggcctgtgccatggctcgccgcggctaccactgcggcattctggatgccgatatcaccggcccgtccatccccaagctgttcggcattcatggccgtgccatggcggacgacaagggctgctggcccatccagagccgcatgggcattgatgtgatgagcatcaacctgctggtggagaacgaggaggaccccgttgtgtggcgcggcccggtcattgccggtgccgtcaagcagttctggaccgatgtggtctggaaggacgtggatttcctgttcgtggatatgcccccgggcaccggtgatgtgcccctgaccgtgttccagagcctgccggtggatggcatcgttgtggtggcaagcccgcaggagctggtaagcatgatcgtggcaaaggctgtgaacatggccgagatgatgaaggtgcccatgctgggcatcgtggagaacatgagctacatcgtctgcccggactgcggcaagcacatcaatgtgtttggcaacagccatgtggacgaggtggccgcaaagcatcatctgcctgtgctggccaagtgccccatcgaccccaaactggcagagctttccgatgccggcatgatcgagacctatggcggcgaatttttggaaggtgccgcagacgcctgcgaaaagctgctgaaaaagtaatgcaccctgccctgtgcccgttgcgacacagggctttttgcttaccaaagcccgctgccgtgcaaaagacattcttttccgtgcagctttggagcggcagtgcactttaaaaaacaaggttcgcggcgcattccggcttttaattttcgttttgtgaagcagctgtgactttttatctgtttttttaaacaaattctgctttttgctattgtaaaacccaccgcaaagctttataataataaagtaagcattgcccgccattgcgggcgtgccgtgcaagcatggagaaccggaagcgcccggcatctgcaaggatatacccgctgtgcggcgggcaggggcatttccgctttttcaaatttatagagtaattgggaaaaggagtattctattatgctgacgaatgaatacctgaagcgtgtttacgagggtctggaaaagcgcaacgccaatgagcccgagtttttgcaggctgtgcgcgaggtgctggagagcatccagcccgttgtggaaaagcaccccgagtacgagaaggccggtctgatcgagcgcctggtggagccggagcgcatcatcaccttccgtgtgccttgggtggacgatgccggtaaggtgcaggtgaaccgcggctaccgcgtgcagttcaacagcgccatcggcccctacaagggcggcctgcgcttccatccctctgtcaatcagggcatcctgaagttcctgggcttcgagcagaccttcaagaacagcctgaccaccctgcccatgggcggcggcaagggcggctctgactttgacccccacggcaagagcgacatggaagtgatgcgcttctgccagagcttcatgaccgagctgtaccgccacatcggccagttcgtggactgccccgccggtgatatcggcgtcggcggccgcgaggtcggctatctgttcggccagtacaagcgcctgaccaacagcttccagggcggtatgctcaccggcaagggcctgaccttcggcggttctctggcccgcaccgaggctaccggctacggcctgtgctacttcaccgccgaggctctgaagtgcatgcgcaacgacagcttcaagggcaagaccgtagtcatctccggctccggcaacgtggctatctacgcctgcgaaaaggcgaaccagatgggcgccaaggtggttaccatgtccgactccaacggctacgtctacgaccccaacggcatcgatctggcttacgtgaaggacctgaaggaagtgcgccgtggccgcatcaaggagtacgccgagacccacgccggtgctacctatgtggctgattgcacccaggtttggactgtcccctgcgacatcgccctgccctgcgctacccagaacgagatcaacaaggagtccgccgaggctctggtaaagggcggctgcaccgtcgtgtgcgagggcgccaacatgcccagcaccccggaggccatcgaggtctacctgtccaacggcatcctgtacggacccgcaaaggcttccaacgcaggcggcgtggctacctccggtctggagatgagccagaactccgagcgtctgagctggagctttgaggaagtggatgccaagctgaagggcatcatggagggcatcttccacgcttcctacgacgcttctgtggctgccggttccgagggcaacctgatggtcggtgcaaactgcgccggcttcctgaaggttgctaccgccatgatggcacagggcatcacctactaagcttttctctgcatctcaaggggctgctgcacaaaccgtgcggcagccctttgtgttatgctccgcgccggtataggccggacacatccgactcttcacccgactcttcaaaagtcccctatgacccatagagttttgaagagttactttttctgcgccaaaacacgcagaacgctgcgctttttgccccgactcttcaaaatcaaccaaagttttgaagagtcgcaaacacaacgtagatacgctacttttagatactattcaatataaaaaagtagtaataatgtccgactcttcaaaagtccccttgtgtcatagggctttgcagcctgttttgaagagtcgcccggcagggggacgatttgaaatggcttccgctgcgctttagccataatcagcggaatgattattttaatttgcagttcaagcctgcgggtttggctgaactgccttttcacgggagtgggggtcgtaaaggcaagcggcagccccttctgtgaaaatagcgtttggagcactccgcagagtgcgacaaacgcgaaatagaaatattctttccgctgaagatgcgcagagcaacgcggcgcgcatttccaatcgttacactgtccgctatgcgtacacaattgcccgccataggcggcatctcgcacaagaagcggcgcaatgtgtgtagcatatttggtgcagctgtcacttgaagatttttcaggaatctgtataatatcagatatcggaacaaaggcgttccgcaggggcatcctatgcccttgcggggcgcttttttctttttgcaggggataaaaagctgcggagggtgccgcagcccccggtaaacaagtaaaaaggatgggaaagactatggaaaactttacagagcagaaaaccacccttggtctgtacgacccacagttcgagcacgatgcctgcggcatcggcgctgtggtggacatcaagggacgtaaaagccaccagacggtggatgatgcactgtccatcgtggagcggctggagcaccgcgccggtaaggacgccgagggcaagaccggcgacggcgtgggcatcctgctgcagatcagccacaagttcttctccaaggtggccgaggagctgaacatccggctgggcaacgagcgggagtacggcgtgggtatgttcttcttcccccagaacgagcacctgcgggcacaggccatgaagctgttcgaggtggtcacccgcaaggaggggctggagtttctggcatggcgcgaagtgcccgtagaccccgatgccgtggggcagaaggcccgggactgcatgcccgccatctggcagtgcttcatcaaaaagcccgccaaggtaagcaagggcattgagtttgaccgccgcctgtacatcgtgcgccgcgtgttcgagcaggccagcaacggcacctatgtgcccagcctgtccagccgcaccatcgtgtataagggtatgttcctcgtgcacgacctgcgccgcttctacgctgatctgcaggacccggattatgagtccgccatcggcatggtgcacagccgcttttctaccaacaccaaccccagctggatgcgtgcacaccccaaccgctttatcctgcacaacggcgagatcaacaccatcaagggcaacaccgacgccatgctggcgcgtgaggagagcatctccagccccattttgcaggacgacatgaacaagatcctgcccatcatcaacacctccggttcggactccgccatgctggataacacccttgagtttatggtgatgaacggcatggacctgccgctggctgtgatgatcaccatccccgagccgtgggagaacaacaagaatatcagccagaaaaagcgggatttctaccagtactacgccaccatgctggagccttgggacggccccgccgccatcctgttctcggacggcgatgtgatgggcgcagtgctggaccgcaacggtctgcgtcccagccgctactatatcaccaaggacggccgcatgatcctgtcctctgaagtgggcgtgctggaatgcgacccggagaatattctggtcaaggagcgtctgcgccccggcaaaatgctgctggtggataccgtcaagggcgaagtggtggacgacgagaagctgaaagagctttacgccagccgcgagccctacggcgagtggatcgaccgcaatctggtgcagctgagcgggctgaagatccccaacgtaaaggtggagagctacaccggcgagcagctgacccggctgcagaaggtgttcggctacaagtacgaagacgtgaacaccatgatccttgccatggcgcgggcgggcgcagagccttccggtgccatgggtaccgacaccccgcttgccgtgctcagcagccagcatcccccgctgttcaactactttaagcagcgtttcgcgcaggtgacgaacccgcccattgatgccatccgggaaaaagtggtcacctccaccagcgtttatattggtgcccacggcaatctgctggaggataagccggagaactgcaaggtgcttaaggtgcacaaccccatcctgaccaacaccgacctgttgaagatcaagtacatg

SEQ ID NO: 523 - DNA, 10435 bp, unidentified
  source 1..10435: mol_type = unassigned DNA
ttaaataggtacgtatacggctttttttgtttgaaagaattcttcgtcgaaataatctttcaggtcgaatatcatggccgtgcgtctgacaggggctatttcaccctgtatttcaccccctttaagacatatcagaccgttgggcatagcattgtgctggtggttgcccacgttcttacgaatcagtttcaacaaatctcccagaggcatgacggctcggcttacgatgaagtcgtatttggttttgttttcttcgacgctgcaatgggcaaacgtaacattctgcaatccgatagcttgtgctatttcctgtgccactttgattttttttccgatgcgatcgatgagatggaaccggcactcgggaaagagtatggcgagaggtatgccgggaaatcctcctcccgttcctacgtcgagaagcgttgtttcgggtgtgaattgtatcactttggctataccgagggaatgcaatacgtgatgggagtaaaggttatcgatatctttacgagaaatcacgttgattttggcattccagtcgttatacagcccttgtagagcggcaaactggtcgtgttgccggcttgtcagattcggaaagtatttttcgatgatctgcatggtctcttttctgttatttcgatgcaatacgtttcaaaggagagtcggcgacgaggtagcccacgatagcccggtaaggcagcgtgatgcgcgttgtcccggtcgagtacggtgcaatatcgtaaggattgaacaaccaagtgatacctttatcgcttatcatgaaattgtcatcggcaatgatattttcggtttcataactcttttcaccgagtttatcgacacttgtatccagatcgtcggcaagttgttgacacagcatgcggtttatcaggttgtaatcgttctcggcaaacaggtcttttagcgatagcgcttttccgcttttcaagtctacgacattatatgacgtcgtggtcataccgtgtgccccgccggtaaacgtgtatgtttcgatactgtatccccaaaaaagatcggcattatataagttttcgctttttacgattatttcgtaattcatccacccttcatcgcggtgtttgtgctttttgagatagggttttatttcggcttgataatcggcaatgtaatttttaacaaaatgttcgacggcggtacggggcgaatggctttcttgcataccgtcgggcaaagaagcgacgaagagactttgtaatttgtttaaggaggtatttccggtgtttcctcccgaaggataggagatgtgtatatctatggtacaaccgggaagttttgtattgtcgtcgatatagctttttttgaagtagttgtatttcgagaatgtgagattctctggctgtttgaccggttgcttctcggatggcgattttgtttctacggccggagtttctgttttttccttgttttcgttgttccactgacatgatgttgcccaaaagaggctacatacgatagcaagggttattttataacgtctcataaagatgtagatttgaggtttgagttcggattattatcgacaaatgtatagaaaaaaaacggtaaaccgaatagttgtcgtatatttgtgtcggttaagatttttttatggttaatatcggaaattacaatacgttgcaagtccttcgggttgtcgatttcggcgtttatctcgatggcggggaaaaaggggatatacttttgcctttgcgttatgtcccgcagaattataaaattggagatgaaatagatgtttttgtttattacgacagtgaggatcgcatcattgccacgaccgaacgcccttatgcgctggtgggcgaatttgccgtactcaaagtcaattcggtcaattccgtaggcgtttttctcgattggggacttgcttcgaaagagttgcttgttccttttagggagcaacgggccgaaatgtttcccggaaagtattataccgtgtatctctatctcgatgaggtcagcgggcgtatcgtagcaacggccaagttaaatcgttatttgcagagaaaaccggtcgattatactttcaatcaggaagtcgatattttggttacgcaagaaacggaattgggttttaaagtgattgtcgataatgcccattggggtatgatatatcataatgagatttttaagccggtacatcggggcgataggttgagagggtatgtaacccacattcgagccgatgaaaaagtcgatgtggcattgcagccggccggttatcaaggagtagatccgctttctcaggaaattctcgctgttttgcaggagaggggagggtttattcctctcagtgataaatccgatgccgaagagattgcgtcgacgttcggttgcagcaagaaaaatttcaagaaggcgatcggtgcgctttataaaaagcggataataattattctcgatgagggcattcgcctcgccgagtaatgatcgtaaaataacaacagccccgctaaccggcggggctgttgttttatgatggcagatatattatacatcaaggctttcgcaagcttgtatccatgatgttgcgcaggcatcgctgggcatacgccagtctcctctgggagaaagacttaccgaacccactttgggcccgtcgggtaagcatgaccgcttgaactgctgggcgaagaatcgacggaaaaatgttgtaagccatttttttatggtcttgcgatcatattgtgtgccgaaagcttcttgcgccaagaagtagattttctcgggtcggcagccgtggcgcagaaaatagtaaaggaagaagtcatgcagttcataaggtcctacaagatcttcggtcttctgtttgatgttaccttgttcgtcggccggaatcaactctggactgatgggggtatcgacgatgtcgagtagtgtggcgcgggtcttttcatcattctcttgtgaagccacccagttgacgaggtggcgtaccagcgttttaggaacgccggcgtttacaccgtacatcgacatatggtcgccgttataagttgcccaacccaaagccagttccgacaaatctcctgtaccgatcaccaagccgttcgattggttggctatatccatcagtatttgggttcgttcacgggcttggctgttttcataagtaacatcatgtacggaaacgtcgtgtccgatgtctttgaaatgttgaagacaagccttttcgataccgatttcctgtatcgttactcccagcgaatacatgagatcgagagcattgttgtaggtacggtcggtcgtcccgaaacccggcatggtgataccctgtatctgtttgcgggaaaggttcagccggtcgaaagcccgtactgctaccagtagagccagtgtcgaatcgagacctcccgagattcctactacggcggttttggcattggtatgtttcaaccgtttgaccagccccgagacttgtatgttgaagatttcttcacaacgttcgtttagcagttgttcgatatggggaataaaggggtgcggatctattttacgggagagccgggtgatagaatagtggggcagttcgatcggtatggtacggtacgaatttttgtcgatacagtcggtaaaacctgtatttccgagtcgttcgcacatgagacgctcaatatctatttcggaaatggtcagctgcggagaatcggaaaatctgcggctttcagccagtatgatgccgttttcggctataatgccgttacctccgaataccacatctgtcgatgactcgccgggtccggccgatgcgtaaaggtaggccgataccgtgcgggccgattgttgtgtgatgagctggcgtaagtaattgtgtttccctaccagatcattgctggccgagagattggcgatgatattggcaccgtgtaggctatggtatgatgccggaggtatggcgacccataaatcttcgcatagctctacggccaatgacacttttcccgatgtaaagagcaggcgggggccgaaaggaacttccatgttgcagcaggtaatacttcccttatcggtttcgtcggcttgacaaaaccaccgtttctcgtaaaattccttgtagttgggcagaaaacttttgggtacaatgccgtaaattgtaccgtttcctataacgactgccgtgttgaagagtctgttgtcttgccttaacggacagccgacgatggccagagcttttgtctgtcgagtggcgtttacgatgcgggatagtgcggcttctgcttcatcgagcaggagcggttgtccgaaaaggtctccgcaagtatatccggtgatacaaagttccggaaatacgatgatttcgatttcctgccggttggcttcctgtaatagctcgatgatctgtccactgttatataggcaatcggcaaccttgcaatcgggtatggcggttgccgtttttataaatccgtaattcatagtcgatgtgtcaagatgtgcaaaagtagaaaaattcacagcttcctgccaatttgcactcgaaatttttctctttaccgatgattcgttatttttgtatagtgataataccgtgtaattatgaagtggaatatatctaaaattttgtgtcttgtcggcctgaccatgagtgtcgctccactctcttctatggaagtagacgatctctttttgggaaaatatcgtgtgaaaacggttgcaggaatacgtccgtcggccgatggtgtgcactatacatgtttgtcgcccgaccgtacatgcatcgttcgttatgcctatgcgacgggcgaagccgtcgatacgttattgaatgtaggaaaagtttccgggagaccgataaaagcaatagcgggatattcgttcggcagtaaagaagatcgtatgctggtatataccgatgtagagatgatataccgtcgttcttttcgggcggcttactattttacttcggtaggaagcaatgagctgcagcccctttcggatcgattctccaaacagcaaattgccacactgtcgcccgatggttctcgggtggcgtttgtgtatgaaaacaatatatatgtgaagaatttgctcgacggtacagaaacgcaggttacccgggacggagagaaaaacaagatactcaatgggattaccgactgggtatatgaagaggaatttgctcagacccggttgatggcgtggtcgcccgatagccgggcactggcttttgtgcgtaccgatgagagtggagtgcaggaatatcccatgcagatgttttgttcgtcttcgggagaatacgacgatccgcaagaggtatatccccgatatgccgggtttaaatatcctgtggctggagccgataacagcaaggtctcttttcgcgtgtggaaagaagatgctggaaatttggaaacggtcgttttgccggtcgatggagatacctatctgccggcgataacgattattccccagacgggagagtgggtcgttactgccataaaccggttgcaaaatcatattcggctgttggcggtggatatacaggacaatacttcccgattattgtatgaagacaagtccgacacatatatcaacgaacaagatattacgtcggctgtattttatcccgactgtttcatggctttctccgagaaaacgggatatcgtcatatataccaatatggttacgacgggaaattgcagcgtacggttacggcgggaaattgggaggtaactgattattacggccgtgatgcaaaagggaatatctactatcagtcgaccgaagaaggaccgttatatcggacgttatattgtgttgataagaaggggcgttgccggaaactttctgcgcgtaaaggaaataattcggcttggttcaatccttcctgtacctactacataagtcaatatagtaatacctttacgccgccggtatatgctcttaatgacgtaaaaaggaaacgggttgtccgtgttctcgaagataatgcaggttatccggtcgaagattttatcgggaaagaattttttacgatgacgacagccgatagtatcgtgttgaacggttttataatgaaacctgccgatttcgattccacacgtcgttatcccgttgtgatgatgcagtatagtggtcccggctctcaacaagttctcgatgcgtggagttcggccgattggcaacaggtattggtaccacagggatttattgttgcttgtgtcgatggccggggaaccggggcacggggcacggcattccgcagttgtacctacggccggttaggggttttagaggcgcaggatcaaatcgctgctgctcggtatatggcatcgcaatcctatgtagacccggagcgtatcgctatttggggatggagtttcggcgggtttacgacccttatgtcgatgtcgatgagtaaagatgtgtataaggccggagtagccatcgcacctgtaaccgattggcgtttttatgatacggtctataccgaacggtatatgtcagtcccgcaagataatgccgaggggtatgatgccgcatcgcctttgtgtcgtgcaaaagacctttcgggaaatcttttgattgttgccggtacggccgatgataatgtgcactataccaatatgctgcgttatatcgatgcattggtggctgccgacaagtcatttgaaatgcagatgtacaccgatcgcaatcacagtatttacggaggaaatgcccgtccgcatttatataagcgttttatcgacttcttccgttgccaacttctccggtaacgtaggtatttcgtaagaatatattgtagatgttcggttataaaaaaggagggtaggcttttgcctaccctccttttttatagaattcccctgttttataaaggcatattcccgtgtttcttggggggattgctctgattcttgtttgaacacatattcaaagcctgtatgagtttccaacgggtatcacgtggcataatgatttcatcgatatatccgcgttcggctgcccggtaaggattcgagatttccgattcgtattctttaattttttcggctttttcttccggagtagctttccgataaagaatgtttactgcaccttctgcacccatgacggcaatttcggattgcgggtaagccagattgacatcagcccccgtctgcttgctcgacatgacgatataagcaccgccgtatgcttttcgagtgataagcgttacttttggaacagtggcttcggcataagcgtagacgattttggctccgtggcgtatgatgccgttatgctcttgtatggttccgggaaggaatccgggaacgtcttcgaaagtaatgataggaatattgaaacagtcgcagaaacgaatgaagcgagctgctttgtccgatgcgtcgatgtcgaggactcctgcaaggtaggccggttggttggcgacaatacctaccgtccggccgcccaagcgggcgaatccgataacgatgttcttcgcaaaatgcggcatgatttcaaaaaagtactggtcgtctactaccggttcgatgatgtctttgatatcataaggcatattcgagtcttcgggtatgacggtctgcaactcttcgacttggcgatgtacgtcatcggtacaggtgacgatgggtgcatcttccatattgttcgatgggagaaagctgagtaattccttgatgtgcatgagcgtttcttcctcggtttcgcacatgaaatgggtaacaccgcttttgctgctgtgcgtatatgcgccgcccaactcttctttaccgacttcttcgtgtgtaacggcctttacaacatcaggaccggtgatgaacatatggctcttctcttttaccatgaagatgaaatcggtgagggcgggagagtagcaagctcctccggcgcaagggccgagaatagcggagatttgaggaataactcccgacgctatcgtgttttgatagaagatcgaggcatatcccgagagactgtttacaccttcttgtatacgagctccccccgagtcgttgagcgcgatgatgggagcaccgtttttcaatgccagttgttggacttttacgatctttgcagcattgctttcgctcagagaacctccgtgtgccgtgaaatcataggcatagatgaataccagacgtccgtcgatttttccgtatcctgtaaccatgccgtctccgggaatttgttttttctccattccgaagtgggtgcaccggtgcgtaacgaatttatcgagttcgttgaacgtccctttatcgagtagcatatcgatgcgttcccgggcggtcatacgtcccgattcatgctgcttttctattttgtcgagacctccgccctgagaagcttttttatcgaggttctcgaattcttcgtatattttttctctatccattgcttttagtcgttatttatgatttccaataaaatcaatgtttgatttccgtttaccgaatcgccttcgttcaccagaatgtctttgacgatacattccgagttcaccttgtaattgctttgcattttcattgcttcgagtacgatgacaatatcgccggcttgaagatgatcgcctttctgtaccggtatctttacgactttgccgggcatcggggcgatgattttatcgtcctggcgggtatcgtcgccttttttcatacgcagatattttgcctgagtatcgacaatatctatccggtacgaacggtagaaaatattcacatcgtagcttttcttgctttctttttgaatgagttctgcattgtaggaattaccctcgtgcagaatagagcaactgccgttttcggccatgacgatatcgacttcataaggtttcccatcgatggtaagctgcactttattgccttctttgttgaccagcgaaacgtcggccacccggtttcctatatgtatttccattactattttctcttagatacgtaaaacacctttttgtagtccgaattcgcgccatcggctgatgggacgcgcatcggtcagttgtacaggagtattctcctccaagttcatgaggtaatcgatataagcggcgatcatagccagattctcgatttcttcattgttgctgttgttccgttgcaacatgcgggcattcttttcgataaagagcgtgttatattcaccgcgcacgaaatcgggggtatgcatgatgcgtttcagataactgaggttggttttcagtccggtgattttgtattcgtacaatacgcggcgcatacgttctatggcatattggcgggtggtggcccatacgatcagttttcctatcatcggatcgtaataaatcggtatttcgtacccttcatatacataactgtcgatgcgtacgccgataccgttcggttcggtgagttgtttgatgatacctggcgacgggaggaaattgttttcggtgtcttcggcgcatatacggcactcgatagcatgaccgcgttgcaggagatcctcttgtttaagatgtaatacttcatcgttggcaacacgtatttgttcttttacaaggtctacgccacaaacctcttcggtaatggggtgttcgacttgcaggcgtgtattcatttcgagaaagtagaaattccgatgtttgtctacgaggaattcaatggttcccgcaccggagtaattcacggctttggccgcggcgacggctttttcgcccatctcttttcgcagttcgggagtgagaaaaggagaagggctttcttccacgattttttggtggcgacgttgcacagaacattccctgtcgaaaagatgtatcacgttgccgtgattgtctcctaaaatctggaattcgatatgatgaggctcttctacaaatttttcgaggtataccgtatcgtcaccgaatgacgacatcgattccgaacgcgccgtgttataggcttccagtacttcgtcttcgcagtggataaggcgcatgcctttgccgcctccacccatagatgctttcaacatcacgggaaaacctatctctttgcagatacgcacagcttcttctccgctttgcagcggttgttcggttcccgggacgacaggtactcccgctgcaatcatacgtttacgggccgaaattttatcgcccattgcttccatcgtttcggccgccgggccgataaatacgataccttcttttttgcaacggcgggcaaattcggcattttccgataaaaaaccgtagcccgggtgtatggcatcggcgtggtgcagtttggctgctttgatgatattgtcgatgttcaggtaactttcatgagaagccgcaggcccgatcaggcaggcttcgtcggcgtacatgacatgtttcgatgtacgatcggcttccgaaaagactgcgatggtgcgaatacccatctctttgcacgaacgcatgatgcgtatggcaatttctcctcggttggcaatcaaaattttctgaatcat

SEQ ID NO: 524 - DNA, 19069 bp, unidentified
  source 1..19069: mol_type = unassigned DNA
ttaccagatcagcaatccgatatgatagaacaggcacgccagggtcagtgaaaataccacataatacaatacagaaagggcaatccactttttggaatggttttccctgtaggttgcagcaactgtcatggtacagggcacattgaacatgatcgccatgataaagccaagtgcctgcggctttgagatcacctgcggcagcagctccatcatggattctgacaggccaagtgacttggaattaaaggcagccgttaccatatcggtattgctgtacagtgcattcagcacgccaagtagagattccttggtcatcatggaagataaatatgccatgaacatctgccagctcatgccaaagaattctgtcaccggcgcaatcagctgtcctgcctttgacaggatgctctctgttccaaaccagttatagctcagcagataaaataccagcgataccagcaggatcacacggaaggcacggcagaaaatatcctttgccttgttcagcgttgtccggaagatataactccacttaggcttatgataaggcggcagttccatgatcattccgcctctgccctcttctccgaccagtgactttgcaaagatccgggatgctaaaaacatggaaccggtagtaatggcaaacataagaagcagaaccgccaaacctcctgcgggtccgaaaaataaagtagccagcatgggtcccatggaaagaccggtaccacagggaatactccatacaaggatcatggtcagaaaccgttgtccgttattgtcaatcacacggctcccggcaacacctgccatattacagccaaggctcatcagaaaagagcagacgcttttcccctgcagtccaagacgctccatcgcctgattaaatactacagaaatccttgccatataacccacatcttcaatcagggcaaatacaaaggttactccaagtacaaagcccgccatggatacggtaaagaacagtacattcggcagtacggtggctaccagatctgccagtggtttccatacattcatccgattcatcagcgtctgcagcggaggccctatcagtgccgggatcatggctccaaatcccatgatcggtgcagcgaccaccatggcagccagcagtgccagcacaatgatcccaaaggccacccattttccggagtgccttcccagtgcttttctgtcaaaactgccaagctcgctgctgctctccttcttttttacagcacctgcaagaatactgtcgatcagctcatatttatgctttcccgaaatcatcagtcctctgtctgttttttccagctcctgcactgccagcttctctttcgtatagactgctgtttcctgctgttttactgtaagctcttcaaaatggcagtctggatcttcataataatatttcataagaaggctgctctgtgccattctcccactgtctatcgcttctgcaagcttctccttcagttcaccatagcgtctgatatctgctgccacaaagcccatgaccggaatgccaagctttttctgtatcttttctgtatctatctgaatccccttcatttttgccacatccatcagatttaaaaccaggatcaccggaatattgatcccgataaaatcggtaaacatgtacagtgaccgttccagctgtgaactatctaccaaaaccaccaccagatctgccttgccggaagctatgtaatctgtggtaatgacctcttcctctgatcctgcagaaaggctgtagcttcccggcaggtcgatcacatgatattcctctccctgaaaagaaaaaacaccttccttatgctctactgtcttgcccggccagtttcctacatgctgatgggaacctgtgagtccgttaaataaggaagatttcccggagtttggctgtccaagcagtgcaatcgtcttactcattttccttccctccctctaatgtaattccttcacagtctttccggccaagtgccactacggaatccttacagtaaaataatacgggctgccccttctgattctggatcacacggattctggttccttccacaatgccgatcccgaccagtcttgacagtatgtgatgattaccggttaccgctgttactattcctgtatatccggcatttgcatctgctagtctcatatctctccctgcctttctttctgtcctgttgctttcctgcttctctttcgcgcagtttgttgcagctaacttttattagtttattatgcagagcaggtgccgtctatatcactttcagtaaaaaaggtttgtttagcattctgttctttttatgattgtcatttcttatatctgattttataatagtttctgtgaaaataataaagacaaggaaaatttgattttatggaaaaagacaattcagctccaaatgggatatccgctatgatgcgggcactggattctctggatcaggcagatggtcccatgtctgtccactgtaacctgccagatggttatatggatctgaccatttactctgtactgcccggtatttatatggtcaaaaatgatatccatgcttcttctgtgccagcccttggtgaatctatgccgtttgaaatttatactgtgaattactgtatagacggccggtgcgaataccggctttctgatgacaattacagctatgtgattaagaatctgatgacagtaagcaccggaacaatccccggctccttttattatccttcttcctgttatctgggatatgaaatttatattgtgccttccctgttttctgaaaaaacgaaacagatactggaaacctttcagattgcccttacggattttccggactactacccctgcaatgcgcctgccggaatcgcagatctatggaaatccctggaacaacagatgaaaaaagaaaatacaggtgctgtccggcttatcaccctgcagcttctgtacgcgatcgtaaacagcagtatgcctgtcatgcagcacaccatttacctgactaaaacacaggcgcagctcgccaaacagctgaaggagattctgacagaaaatttcagccggcacattgcagtccgtactgtggcagatacttatggcatcagcgaaaccagtctgaaaaactatttccgctatgtctatggaatgaatgtttccacctatctgaacaaagcacgtatggaatatgccggccgtttattgtctgaaaccaccttaagtatcgccgatatcgccagaagctgtggttataccaatcagggacggtttgcaaaggttttctgtgattattaccaggtaaagccccttgactaccgcagggcttccagaaatccggacacgctctgaaccagaacctgtcagatttctgccctccggattcccgtcaggaaagcagatcgatcaggccccgtattcctttctcctgataaatggtcttgtaataggacacctcgttctggatcagttcatcgatcacacgcattccaagaagctctaccggtgccttatcatctgtcatgatgtgaccacctgcttcgtaagcttccagatgatcttcgatccgccccatcatggctgccagatcaccgtcctgttcaagcgctgcattgagcctgtaggtttgcagcatatccgcattgtcagaagcgaacagctcccggtttgtagatccactcacatctaccgtgcagacctgatcaaacacctcagaaatagtgtctgccagatactcattaatgtttccctcagcaccactgtgcatgttcatattgacgaccatgacaccatcatccttcaaatgatcctttaccatagtaaagaactccacggtagacatctggaacggtatggtaatatcctgataagcatccaccatgatcacgtcatacttttcactgatcgcattcagatatgctcttccgtcataggtcgtgacttccacatcctccggcagttcaaagtactttctggcaagcttcgtgatcttttcatcaatctctactcctttaatggatgtattgttaaaataccgctcacactgggtagcataggtcccggttccgtttccaaggatcaggatatccagtctgtccttttccttcacacccgccatataaggggcagccatggcataatcataatacataccggtcagccctttatccttcaggtacaccgactgcacgccgaacagaacattggtagagagcactacttccctgtcattttcataaacctgcagataattgtaaatggactctccctcataggtaagattactctgccagaaagcaaagctgttgttatggccaagaaggcagcagatcagaaatattacaatactaatcggcaccctcctggccccggtaaaatttcctctggtactcacaaaataaataacagccagcaacagcagaatacctgcaaagatcaagaatgtgatcgaggttcccactgccgggatgctgataaaggtcggtacaaaggttccgataatacttcctatggtattgaaagcattcagctttccaactacgcttccgctgtcatccagactgtctaccgaaaactttaccaaagacggtgttaccgttccaagcagaaacagtgggaatacaaagatcaccatacatgccacaaatccggctataataaggaagttactgtttacggcaaagatcagcagtgctgatatcccgatgatgatatactttcctacaaccggtatggctgcgatccacaatgctgcgatgataatacgtccataaagcttatccggatttggatccttatcagctgcctttcctccatacaggttgccaagtgccatggcgatcatgatcgttccgataatgatcgtccatacgatctgggatgagctgaaataaggcgccagcagtctgcttgctccaagctctactgccataactgacattcctgcgaaaaattctgtcagatacagatatagcctgcttttcaaaatactgttcttcatttctgtctgttttcctttctgccggcaaagatgccatgctatatctttttcaaatcagattaccgattttccgaggtccccttttggctgaatctgcaaaaaaggctcccggcgttttgcacggaaccgggaacctttctgtccatttaggacattacattttcttacatcagcttgcggaacaatgctgtcagatcttcgatgctggcatccttcgggttacccggtgcacacgcatctgcatgagcggattctgcaaggaacggaagatcctcctccttcagcgcttccagtttagccggaatacctacgtcctcagaaagcctgcgtacagcatcgactgctgccttacggtaagtttcctgatccatctggtctacgccttcaacacccatggcacgggcaatttcacgatatttctcgccggtgcagtctgcattgtactccataacgataggaagcatcattgcacaggcaactccgtgaggggtgtcataaacagcacccagtgtatgagccatggaatgtgcgattccaagtcctacattggaaaatcccatacctgcaatatactggccaagcgccatcccttcccgtccttctttggtattggcaacagcgcctcttaaagatcttgaaatgatctcgattgctttcagatggaacatatctgtcatttcccatgctgcctttgtggtataaccttcaatcgcatgagtcagggcatccataccggtagatgctgtcagtcccttaggcatggaagccatcatttccggatctacaactgcgatgatcggcatatcatgaggatctacacagacaaatttacgcttgcgctctacatcagtaataacatagttgatcgtaacctctgctgctgtacctgctgtagtaggaactgcaatgatcgggatgcagggcttctttgtaggcgctacgccctcaaggctgcggacatcttcaaactccggattggcaatgatgataccgatcgccttggaagtatccatggaggagcctccgccgattgcaataatatagtctgcaccggaagccttaaaggctgccacaccgttctttacattatcaatagtaggatttgccttgatatcggaatagatctcataagccagtccttctttttccaaaagctctgttacctttgctgtcactccaaatttgatcagatcagggtcagaacatacaaatgctttctgaaaagcatgtgcctttgcctcgtttgcgatctctgcgattgcccctgccccatgataagaggtctgattcagcataattctgtttgccataagtaaaaaatctcctttctcttctctgtggtaaaattattacctgctgcttcaattataatcgaaaatgcagaggaaaggaagtcctctttaaagatcattacatatcagccagaagctcttcctgtcagctgtccgtgttatttcataccttccggtgccttgagtggacaccttcctgtcagttcataatgacagttgcagcactcatccccgtcaccaagtaccttggtccttcggaatccgtttcccatataatgggagatcatgtagtccacaccacagataccgggcagcatcccttctaccccatacttcttggccaccgtcacaaagccacacctcatgatatcgatttcaaaggaattctgatctatatttctgtaatcaatgatccagtcattttccggaagctcaccctttttctgcctctcaagatgcttcgctgcctttttccggaagctgttcagataggtcttttccgtatttttcttccatgtaccgcctgctgcgcatcatggtcagatagtaaataaaataatccatatcctgccctttccgttatctgttgtcgctcttcatctgcatgatccagtccataaaggtatcaaataccagtctgctgtttccgcagttacagtgatttcctgcatcttccttatccgtaaacagccggaaggtcagggatcttacattgaccagtgcattgatctcctcaccgatcatctgataggggataaagtgatcctgattagcaccggcaattaaaatatcttgtgttattttatctgctatgttcatcatctggtactggttcatcttggatgcatattcaaaagcatcctttgcttcataggcatatttgccgtgttccagtccccagcgcacaatttcttcctgctttgctaatttgttaaatatagaattaataattcctttccagttatgtctgatcatccacttggcaagcttcatcttctttgcttcggaaggatctgctgcggaaagcagtacatcctggaaattcgggaaaatactccatgcaatgatcctggtgatcctcttttcaaaagcggccgcacggggtgccagcataccgccaaggcttgctccgatgatcgtcacatctgacagcctgaaataatcaaggactgtaccaaccggcttttcccattcataggtaaaatgcttgccctgtgtcctgactacaccgccctgtccgggtccctcaaacaaatacacctcaaatccatgctccgccagatacagcatcgggaaaaacagttcttcaaaatagctgtcattgccgccatgcagaagaaccatgtccttcttttctcctttggccttcacgtgcatgacagggagcttcacctcttcataaggtactgcaaaacgctctacctcgccgctttcaaaataggacttataataatcataaaacagatctgtcgccagacagtaatacttctttttatccggatcaccgtcatacatgaaaaactcactcatcctgtaataggcaatggcattttccatacgcttttcggcaaatgccttgtcccccagtgcgatcagctctctcttccagtcctcgctggtctggattgacggtcctaccttctgcacttcttctgcatctccgccatcccacatcaccagacggtttaactgatagttaaagttgctctggtcgttgaactgatacatcccctttttaaattccacactcattccattacctttccttttctttgtattttcttacttctatttttctgctattctataaataatggaagagttataaatgattctttttctcaataaccaattatcaatatataaaaggagttttcagatgccatccagccagactattttattatattatatggaaaaaacaaaggaaatgcagatcagacagctttgcaaacggctttccatcacagtaaaaactgttcaacgggccgactattcccagtcacttggctatcttgccggcatagaaggttttgcaagaaaaaatgcagtctatcttggtaatgagcttcctgctgagatgcttgttttctccggcatgacctctgagcagatcgatctgttccttgctgagtaccgtaaaatggggatttctcccattgcctgcaaagccgttatcacacccgtcaacattttctgggatgcaggaaatcttgcagaagagctgttaaaggagcaccaccagctccataaagatcccggtatctgaaacagactgcattttctttctgagacacacttctttatccccacaccatatccgcatttttagtcgtttcatacaccatatccgcgctttcagtcgtttcttgaaaagaaatgtctgatatggtatgattttcccagtactaaatttgaggggtgaagttttttgatcagaatatgttatgtagttggtatctcactgccattcgttatttattatcttatccgcatcagctatgtagaacagcacggagataaatacacagaaactgtccgataccagattgcccgcaatgctatttccatcctgaaattcaatggtatgatccggaccgatgtttacggtcttgaaaatctgccaaaagatggcggctacgttatgtaccccaatcatcagggcaaatacgatgtgcttggtattattttcgctcacgaaaaaccctgcaccatgatgatcgatgacaaacgggccgatctgccactgaccaaggaatttgtttccttattaaagggcagccgtcttgacaagaccgacatgcgaaaacagttaaaaaccgttcttcaggttgcctcagaggttgcttccggcagaagatatatcgttttcccggaaggcggctacgaccacaataaaaacgaagtccacgatttccttcccggtgctttcaaatgtgccatgaaggctaggcgtcctattgttcctgtggttcttatcgattcctactcgattcctacaaggtcttcggcgtcaacagcttaaagccggtacgcacacaggttcacttcctaaagcccatgtactatgaagattacaaggatatgacctcaaaggagatttctgatctgacaagaaaccagatcatttctgtgatccagaaggctagctgatattgcaaagaactcagccgatgcagataaactgcagggctgagttctttccttattgtttaactccaatgatattctctttcatattgctcatatattccagggaactgttccggtgtaatcacattctgtggcagatattgaaggatccctgtgttaagagccgactgctgtaaagaatccatgcatgctttcatagttcttatatcttcatccgtaacaggatatttattcctattatcttttgccttattttgaaaacatacaagtgctataattcccggaataatccaccaaaggaacccaatgattatgacaatccattctcctgtgcttaatgatgttcgtttgctgatttcctgtttatagtaattatatccttgcttaacaagtccatattcgatcaggtaatattttgttttataaaacactttatacatatcatcttctttgtctgcaaattcactcatagcctctgccattctctgtgcatatttacaaaaggcttttatattaatctttgattcatcaacattatttgtggtaaaacctgcataatattgtgtcaaagcattgtatgctgtagcctttattgccatattgggccatctgtccagttcctctattaacgtattcaggatctgattatcctcatccaaaagttcctgttttcccatttctttatgacattctaatatcatatatgcagcaaacggtgatcctttctctcttaaaggatataaatatactagtgcctgctcataattactgtgcatatgcataacatataattcggcaatcaatttcagaagcgtatctttttgtgcatagcttgcattaagtttttcaattctgtccataactgtcaatgctttattatataaataatacggttgctgaaattctgtacactgtgaaattctgagatttacctccccaattactctgtaaactgtcacagcttctgataatgcctgtatattcaatgttgcactcaatctatctgcccatttcaaagcagcctcttcattatgtttttcattcaaaaaatactctgttgtttttatcatggcttctacatcaccctgatgtgccagttttaatgtttcctgttcaatcactatttatttcctcctgcacctctctggatttttcatctgcctgcatcataagaagcaaatatcgtgagaggacatcctcattttttcctttttcaatcattttcttcaattcacaaacttcctgataaatttcttcgagtatcttatctctgaaaggacttttttctatttggttcacgatccttggtgcttcctcataatatatttggatacatcttctccccacaggtgttttagataaataattgtcacgaaaagctctcatcaccgtcaactcttcacagtcatccggcaatcccctgtactcacagcatgcagttgtcaaaaaacatcccgtagaagattcacagctattactttgatcccagtggctgcaggaatcatccggataataatagcttctatagtaggtacaatatcccttactgtcctttccttcatactcataatttctgcaggaaccacatttatacttcacaacatagtctgacattttctcccctcctgtataattatttttctcatattatagtctttttaacgactatagtcaatgtttagaggaaacaataccattaagatagttttgaaaaaggtatgggaaaactatgattgaatatagtccattttgggatactctgaaaaaatcaagtgaatctacttacacactcattaacaagcatcacatttcaagttcaacactggataaactaagaaagaacaagccattgaccaccactactatcaatgatttatgcagaattttggattgtaatatcgaagatattgcaagatatacttcttccagtacagatcagaaactataattctgaaatcgcatatctgtctgaccagaaaatcaatgataaaatagaacatggttcgtaaaaaaaagaggaaatacggtatatttacccgatttcctcttttctcatttctttctgtcatctcttcttcctgaattaataatctatatgtccatgaatgacccctctttgctacctgcctttagtgatacttttctgagaatgcccttcctatctgatattactattccatcctccgcttaaaataagtatctgccgcaagcttcagataatactgccccttctccatagattcctgaacggaaatccctctggcaatttccactgcagttacccgatttctgcaaagttcctctgccggtactttacagataccacagaaggaaacgatctccctgttaccggcatgcttcctaataccactcaaaacctttcccataaggctctgttcatccagacatccttccccggttacaactagatcacagtctttcacaagcgcatcaaattgacacagctccagcataccttcgatgccgctgaccgtctttgctctgagaaatgctgtgcatccatatccggcacctcctgcagccccagctcctgcctccggcggcattgcctgacagtcacgctctatcacttttgccacgtggatcagactagcatccagaactgcaacctcttccttcgttgctcccttctgcggtgcataaatataggcagctcccagaggtccatacaaaggattagtcacatcactcattaccgtaaattctgcctctccgatccgctgatccaaaccggaacagtctattttcaataccgctgacagcgtccctcctgccggaacaaatgaccgtccatctctatcaaagaaagtaattccaagcgctgctgccatcccacatccgcagtctgttgtggcactgcctccaagacaaaggaaaaacttccgacagccttcatccagtgccgctcttatcagctctccaaaaccaaaggtactggcttccaatgcacgaaatccggtctgctttgtcaggccgctgctttctgcaatttcaagaacagccgttccatcagaaagaatcccataggctgcctctatcagttttccctccggggaatgtactgtcactgtcttcctgcttccgccctttgcccggagaatacagtccatgcttccttctcctccatctgcaatgggaagtctgacaacctcacacttcaaatgttcttctatggattctgccagaatatcggctacttcctgcgatgtcatacttcctttaaaactgtccggaatcacaatcactttctgcataataaagtcatcctttcctgctcataacttcatcatatcattctccggggcatcaggctatgttttcttcccatatgccccgtctcagtcatttttacgttcatttcactgcctttttgggcatctatgtgcaattttcctgctgatgccccgctctgcgaagttttcggggcaccacagcatattttccttcctgatacccctgaactccgaaaacacacttccgcctttggcccctccaggcccaaaaaaggtggctctgccaaaaggcagagccacctttactcccgcactcttactgcacaatcagattagtatatcccatcaggctttcatccacagcccttgctgcttccctgccctcacggatcgcccatactacaagggactggcctctgtgcatatccccggctgtaaagacattcttcacgctggtttcataggcacctgcgccggtcttcacattacttctctcattgatatctacatggaacgcatcggttacatatttctggcttccaaggaaccctgccgcgatcaacacgatctctgcgggaagagtctgctcggagcccggcacctcgctcatcttcatccgtccgcttgcaggatccttctcccaggaaagcttcacgatcttgactgccttaaggctgccgtttttatccttcacaaattcctttaccgtagactcatagatccggggatcatgaccaaatacagctatagcttcctcctggccataatctgtcttgcagatctttggccattccggccagggattgctggcacttctggtatcgggagcctttggcatcatctcgatctgtgttacagacttgcagccatgacggatgctggttcccacacagtcatttccggtatcaccaccgccaatgataaccacatttttgcccttggtatccacatatttcttgtcttcaaaatcagaatccagcaggctcttcgtattggccttcaggaagtctactgcaaagtagatccccttggcatccctgccaggtacactaatatctctcgggttggaagcaccgcaggcaagtacgactctgtcatactccttcaagagcttttctgccttaatatccttaccgacatccacaccggttttaaacacgatgccttctgcctccatgaccttgatcttacggtctacgatatgcttctccagcttcatattggggattccgtacatcaaaagtccaccaaccctgtcagaacgctcatacaccgttacgctgtggcctcttttattcagctgatcagcaacagcaagtccggaaggaccgcttcctacaactgctaccgtctttcctgtccggaccttgggaggcttcggatcggcatagcccttttcataggcattctcaataatcgcatattcattttccttcgtggcaaccggatctccgatcagattgcaggtgcaggctgcttcacagagcgccgggcacacacgggaggtaaactccggaaagctgttcgtctttttcagacggttataagcctgctgccagtttccggtataaactaggtcattccattccggtaccagattgtgcagggggcagccgcttgtcattccgcagatattcattcctgcctgacagaagggcacaccgcagtccatacatcttgctccctgaagctgctgcttttctctcgggaggtgctcatggaactcattaaaattcttaatcctgtccttaggctttacgtcctttgatacttctcttttataatccataaatcctgttggttttcccatcgtgacacctccttattttgctgccctgactgcgtagaatgcttcgatctgtgcctgctctgcagaaagacccttttcctccatctgtacgatggtagccagcatcttttcgtagtcatgagggatgatcttcttgaacttcggcagataatcactgaaatgatccagaatcatcttacccttttcggaattggtcagagccacatgctccttgatcatatccttcagttcaataacatcatatttggaagttacttcataggaagataccatttccttgttcaggcggatatacaggtcattgtcctcatccagtacataagccacaccgccgctcatacctgcagcaaagttctttcctgtagagccaaggactaccacacggcctcctgtcatatattcacagccatggtcacccacgccctctacaacagcgatcgcaccagagtttctgacacagaaacgctcaccagctacaccattgataaaggcttttccactggttgcaccatacagtgccacatttccgataatgatattttcatctgctttgaaccggcttcccttcggtggatatacgatcagcttaccgccggataagcccttgccaaagtagtcgttggaatctcccacaagctcaagtgtcagtcccttcgggataaaggcaccaaagctctgtccgccggcaccgttacacagtacacggtaggtatcctctgccacctgatccccaagtcttcttgtgatctcggaaccaaggatcgtaccaaaggctctgtccgtattcttgatatctacctcaatgcttcttcttgcaccggtttcaatggccttgtcaagctgctttaacagtaccttttcgtccatggtattttccagcttgaaatcgtaaacctgcttcggatcaaaggtaaccttctccttgctgcccacatagggattctcaaggatcagacttaaatctacctgcttctgactcttagaaaggttatcctttaccttcaggaactcggtatggccgaccagctcatccacagtccttacaccaagctttgccatatattcccgcagctcctctgcgataaagtgcatgaagttgatcacatactccggctttcctctgaaattcttacgaagctccggattctgggtagccacacccacaggacatgtgtccagattgcagactctcatcatgacacatcccatggttaccaggggagctgtcgcaaagccgaattcctctgcaccaaggatcgctgcgatagctacgtcacggccgctcatcagcttaccgtctgtctcgatccttaccttattacgaagtccgttcatgatcagcgtctggtgtgtctctgcaagtccaagctcccagggaagtcctgcattgtgaatggaattcctcggtgccgcaccggtaccaccatcataaccagagatcaggataacctgtgcaccggccttcgcaacaccggctgcaacagtaccaacaccagcttcagaaaccagcttgacactgatccttgcctgcttgttggcattcttcagatcataaatcagctctgccagatcctcgatagaataaatatcgtgatgaggcggcggggagatcagacctacgccgggtgttgaatgtctggtctttgcgatccagggataaaccttgcctgccggcagatgtccgccttcaccgggctttgctccctgtgccattttgatctggatctcattggcgcttaccagatatctgctggttacaccgaaacgtccgctggctacctgtttgatggcagagcatctgttcttgccatcagcccctgcagaaagtctctccagatcctcaccaccttcaccggaattggagcgtccgtgaatggtgttcattgcaattgccagtgtctcatgggcttcctttgaaatggaaccatagctcatggctcctgtcttaaatctggttacaatggaatccacactttctacttcctcgatcgggattcctttttccggataattgaaatccatcaggccacgcaggttctttactgaatcctcatcattgacaagggctgtatactgcttgaacatctgataatcaccacgctttgtggattcctgcagcatatggatcgttgccggattgtacagatgctcgtcaccaccacttctcatcttgtgatgtcccacactgttcagtgtcaggtcatttgcaagtcccagcgggtcaaaagcctgtgaatgcagtgcatccacttccttttcaatatcctttaaggtaataccacccacacggcataccgtatgagggaaatatttgttaataacatccttatcaataccgattgcttcaaagatctgggatccttcataggactggatcgtactgattcccattttggaagcgattttgacaatgccatgtaaaatagcgttgttgtaatcatcaacggctgcataataatccttgtcaagcatatggctgtcgatcagctcgcggatggattcctgcgcaagataaggattgatcgcacaggcaccataaccaagcagggtagcaaaatcatgcacatccctgggttctcctgactccaggatcagcgctacactggtctttttcttggttacgaccagatgtctgttcaaagctgatacggcaagcagagacgggattgccacgtgattttcatctacgcccctgtcagacaggatcatgatgttcacaccgtccctgtaagctctgtccacctctacgaacagtctgtcaatagcacgctcaaggctcgtattcttataataggtgatcggaatcacttctgccttaaagccttcctgatttatatccttgatcttcatcagatcggtattggtcaggatcggattgcttacctgcatcacgtggcagttcttcggggtttcctccaggatattgccgtcggttcccacgtaaacagttgttgaagtaaccacttcctcacggatcgcatcaataggcgggttggttacctgcgcaaatttctgcttgaaataatggaaaagaggatgattggtcttgctcagaaccgggatcggggtatccactcccatggctgcaatagcctcggctccgttcttcgccatgggaagaatgctcgtctttaactcttcgtaggtataaccgaaggccttctgcatccgctgtctttcttcatatgcaaattccggtactctttcattcggaatcttcagatcccgcagatggatcaggttgctgtccagccactcaccataaggctgtctggaagcataaccctctttcagttcattatcatcaatgaccttgccctttgtgacatccacaagcagcatcttgccgggacgaagtctttcctttacaaggatctttgaagggtcaatatcaagtaccccaacctcagaggaaaggatcagctggtcatcgtctgtgatcacataacgggaaggacgaagaccgtttctgtcaagcactgctcccatcacatcaccatcacagaaaagaatggaagccgggccatcccatggctccatcatggttgcgtagtactgatagaagtcctttttgtgctgggacatggtcttgttgttttcccatggctccgggatcgtgatcatcactgcatggggaagatccatgccgctcatgacaaggaactccagcgtgttatccagcatggctgagtcagagcctgctgtattgactaccggcagtaccttatgcagcacgctgtgcagatgctcggattccatgttttcctcacgggcaagcatcttatccgcattaccctgaatggtattgatctcaccgttatgcacgataaatcggttcgggtgggctctctcccagcttggattggtattggtagagaaacgggaatgtaccatggcaatggcagattcgaaatccttatcctgcagatccgcaaagaaagtacggagctgtccaaccaggaacattcctttatatacgatcgtcctgctggataaggaaaccacataggtattatctgaggactgttcaaatactcttcttacaatataaagcatgcggtcaaaatcaagccccttttccacctgtgcgggcttctttataaatgcctgcatgatatggggcatacactcaactgccttatgtccgagaacctccggatgggtaggaacctctctccatccaagaaaagtaagtccttccttctctacgatgatctcaaacatcttcttggcctgattcttctgcagctcatcctgaggaaagaagaacataccaacgccatattctctgtcctctcccagtgtgatcccaaggctctttgtcactctcttaaaaaatttatgggggatctgcgtcagaataccaacaccgtcaccggtcttaccttctgcatcctttccggcacgatgctccagattctcaacgatcttcaatgcattttcaacggtttctctgctcttcacacccttaatgtttacacaggcaccgataccgcagttatcatgctcaaactccggacggtacagaggtgcatctggcacggtctttttcacatcaaacat

SEQ ID NO: 525 - DNA, 12216 bp, unidentified
  source 1..12216: mol_type = unassigned DNA
ttaagactgtgcgctttgcagcatatgaagaaggtgcttttccagcgccttttcttcgttttggcagaaccagaagtggctcgattcgtgcagttgaagcacctgcgcgcccggcaggctgcgccgcacgagcgcgagcgaacgcgagaaggagacaagttcatccccgatggaattcgcaactgcaagcggcggcacgaggcgcggcaggtttttccgcgtccgccccattaggcgcagcaggccgagcgagttcgggatcagcgcgggcgcgttccaaagcgtaacgcccgacacgccgcgcagttcccgcgccgcaacgatgcgcggatcctcgccgggtcgttcccggcaagccgacgcggcgcggatgcggatccccacccatgtcatgcgcaaatacagcgggaaggccagcgcaaaaatccctacgatcctatccggccgctttgccgccgcgttgaccgcgagcaggccgcccatggaatggctcacgaccaggagcgttttttgttgtgcttgcagcgcggcaagctccgcgtccacatgcgcctgccattcccgcctgcccgcccgcaggaattcccgcagggtcccgccatgccccggcagcgtgagcagccggacttccgccccacgagctgccaccgcttccgcaaacggcgcaaacagggcgctgtttcccataaagccgtgtatgaacacgacgcatacgtccttcatttcaggtgcctttccatggcgcatgccgttacagatatagctttaagacgatctccccgccgttctcctccccattttcccggaagccgaacttgtgatacagcgcgagcgcacccgcattgctttccttggtggagagggtgatctcgtccacgccgtgcgctttgaagtaccggatgatctcgcgcagcgcagcgctcccatagcccttgccctgatgggaagcgtcgatcatgaagcgccacagccagtatttatcgtgcggatcgtcgttggcttcgtcgaacgcgaacatcgcaaagcccaccaactgcccatcggcataaaccgcgaacggccgcgccacgtccgggttttctaccgccgtgttcagggacgcttcgttgctggcgatgtattccgcctgctccggcgccaccttgagcgcgatgcagcccgcccggttcccatcgtcaatttttctcagttccacgttcattttggggtaacccctcttttcaatttgcttatttgtctgccgctccccttcaccggatgaagttggtcacggccccgcgttcgcgttccggcgcgagtacgccctgtgcgcggcccgcctcgatgcatttgagcagccaggccatgttccgcgccaggttgcgcatggtctgcaagccctccagatcctgcgccacgtcttccgcgtgctccccgaacgcgacattccaatacgtggaggatacgaccggcatctgcgcaatggtgaaatacttgttcagcacatccacggaagccacgttgcccgcccgccgcgcgacggccaccgccgcgcccggcttgtgcataaagagatcccggcatccgtacatcgcccggtcgagaaaggattggatgctccccgtcgggtgcgaaaaatacaccggcgtaccgaacacgaagccgtccgttcccttcgatttggcgaggaattcgttcacgcggtcgtctttgaacacgcaggcatgcagcttcctgcacacgccgcagtccacgcaatcctgcaccggaccgtttccaatccagaaaagttccgcagaaacgccctcggcttcgagcgtctttgcggcctcgctgagcgcggcgtgggtgctgcccgcctcgtgcgggctcccgttgagcagcaataccttcattttcgcattcctccttgctatggcttaattaaacttccagcccctgcacgaagcggtagagcggcttcatcgcgtcaaagccgtccagcacctcgtcgagcagcgcgggttcaaacgtctttttcagatccttggtgtaatagcaccagctgatgcccttgcggttgaggtagggcttgagcgcctccggcgcgtccgggaaatggtcccgcttatacggctcgccgcgcacctcgaacttggcgaggcgtggatccgcaaggatcgaaaggaagcgctccgggtcggccagaaggcgcgcgcggaagggcttcatcagctccgaatttgcgccgtacatgcccatgccgtagccatagccgtccgggtcgatctcaaaatacacgcagaggctttcactcgtgcgcgtgtccgggtggcggaagccgatccagccatggtcgcggtacgggcgcttgtccttggaaaaacgcgtgtcccggttcatgcgggaaacgacggtcgtaagccgcgtgttgaagttcgggtcaagctcgagcgcggcggggataaggtctgttgcgagcgcgcgcattggttcctgcaccacgcgcttgcagcgcgcccggttcgcgtcaaagaagggcttttcgttgtaaaagcccagctccatcagaaaacgatacgtgtcgggttcaaaccccttgaagttctgtcccatcttttcatccatccattgttccgtttaaaacgtcaatttcatcaaaaaggattcgcgcccttccggctggatcacgccgcgcaggatcaccgcgtccttcgtctccgcacgctccattgcgaattccgcgccctccgtcagctccgttttaaaccagacgtccagccgcttcagcgcgccgatgctgccgcgctcctccgccgtaagcgcatcgtaagcgaattcgccgtaccgctcgttgttcacatggccgagcccatcgatccagctcgggcgcacggtgcggcgctccacctccgcaaaatcggcgcgctccgaaaagcgtttttccgcatgcagcagctcctcgccgcccggcaggtcgaaccgcgaaaggatgctccggtccatgcagagccggtgcgtccttacatccagcagggaggaaaacgtcgcgcctgcggcgacaagcgcgttctcctcgtcgtaaaacgcgatctccctgcggtaggtgggcggtacatagcgcgtgtgccaggtgcgcagggtcagcctgtccttgatgcggatgggccgcatgagcgcgacgctcatcgaaagcagcacccaggccacgccgtattgtgccgaaatgcggggcgtgtcgatctctatcgcttccaaatgcctgccgatggtctccaccgcgatgcgctgatacgccgccgggtacagcgcgcccgcggcgctgcacatgctcacgtccacatataccgggtaggcatagtcctgttctctccaaccggggttcatcgttccctccttcgttctatttggttctttgcctatcataccacgatttacgggcaaatgaaaagcgccatccgaagggagaggcggatggcgcttttgcgggtaaggcttacgccttatttggcagccttcgcggcgcggatggcctcgatgagcatcggagtcaccttgaacagatcgccgcagatgccgtaatcagcaacctcaaagatgggcgccgtctcgtttttgttcaccgcaatgatgcactcggaatcctgcatgccggccttgtgctggatcgcgccggagatgccgagggcgacgtataccttcgggtgtacggtcttgcccgtctggccgacctgatggtcagcgctcagccagcctgcgtcgatcgccgcgcgggaaccgccgacgacgccgccgagctccgcggcaagctcttccgcgagcctgatgccctgctccacgtcccggctgatgccacggccgacggagacgacaaagtccgcgccaacgagatcgacgagcttcttcgcagccttgaccacttccacgacctcggtcttgaggtcagcctcggtcagggagaattgcggcttcacgatcttgcatgcgtccgccttggcctggtcgaacgcggccttcttcatgacgcccgggcgcaccgtcgccatgctggggcggaagcgcgggcagatgatggaagccatcaggtggccgccgaacgccgggcgggtcatcttcatgtcgcgggaaacgtcatgatcctggcccagcacctttgccttcgaggtgcccgcaatgcgctcctcgggcagggtggagctttcacgcaggaagttcttgtagctttccatgtccacgtcgaggtgcgtgcagtccgcgcaaaggccggtgtgcaggcgcgccgcgcagcgggggccaaggtcgcggccgatgttggtcgcgccaatcaggaacgcttcgggcttgagctccatgatcacatcgcagatgaccttggtgtaagcgtcggtggtgtaatccttcagcagcgggctctcgcagacgatcacctcatccgcgccgtagccgccgagctccttggcgaggccttccacgttgtcgccgaggagcaggccgcacagctttacgccgagctcgtccgcgagcttgcggccttcggagatcagttcaaagtcggtgggcatcagtttgccctggcgctgctcgcagaacacccaaacatccttgaaagcagcaagatcggtattgttgaacgtagccattctcagttaacccctttctcagatgatgtgctttgccgcgagcatgctcgcaagcgtttcacagtccgccttctccgcgcccgggagcatcatgcccgcgcccttttgcggcggggtgaaggaggtgaggatgttggtgggagaacccttgaggccgatggtcgtggggtcgatcaacggatcgtccttgagcgcctcatagtcgaacaccgccatgggcttgtcgtagcactcaaagatgccgctcacgctcatgtagcggggctcgttgagctccttgatgcaggtcacgaggcagggggtcttgaccttgatggtcatgtagccgtcctccagcatgcgcttgacggtaatgcagtcgccctccttgtggatgtctgcagcgtaggtcacctggggcaggccgagcttctccgcgatctgcgggccgacctgcgcggtgtcgccgtcgatggcctggcggccgcacataatgatgtcatcctgctccacgccgatgcggttgatcgccgcggcgaggatctgggaggtggcgtaggtgtcggagccgccgaattcgcggccggaaacgagcaccgcttcgtccgcgccgcgggcaagcagctcacgcagcatgccttccgccggcggggggcccatcgtcacgacgacgaccttgcagcccgtctcttccttgagcgtgagggccgcttctacagcgttgaggtcgtccgggttggtgatggtctgcatggacgcgcggtccagcgtaccgtcagggttcacagcgacctttccggaggtatcgggaacctgcttcacacaaacgatgatcttcattttaaccatacctccttcttacttcacgccgaggttgctcgcgatgaccatgcgctggacttcgctcgttccctcgtagatctcggtaatcttcgcgtcgcgcatcatgcgctccacgggatattcacgggtgtagccatagccgccgaagagctgcacagcgcggcgcgtcacgtcgctcgccgcctcggccgcaaagagcttcgccatcgccgcatccatggaataagcgggagccttcttgccggcgagcgcggcttcggtgaacgcctgcttcttcatcgcggcggaatacacaaggaactgcgcggcctgcatgcgggtgtgcatatccgcaagctggaactgcgtgttctgcatctgggaaaggcgcttgccaaactgcttgcgctcctggacgtacttgatcgtctcctccacagcgccctcgccgatgccgagcgcctgcgaggcgatgccgatgcggccgccgtcgagcgtcttcatcgcaatgccaaagcccttgccctctttgccgagcaggttttccttggggacgatgcagttttccataatgagctcgcaggtagcgctgccgcggatgcccatcttcttctccttcttgccgacggagaagcccgggaagtccttctcgacgatgaacgccgaaatgcccttgttgccggcctttttatcggtcatggcaaagatgatgtaaacgctcgcatagcctgcgttggtgatgaagatcttcgtgccgttgagcacgtagtggtcgtccacaagctctgcggtggtctgctggccggaagcgtccgtacccgcgttgggctcggtgaggccgaacgcgccaagccattcgccggaaaggagcttaggcaggtacttcatcttctgctcctcggtgccgttctcatagatcggcgcgcagcagagggaggtgtgtgcggaaacgatgacgcccgtggtgccgcatgccttggaaagttcttccacggccatgacgtacgcaagcacgtcgccgcccgccccgccatactttttcgggaacggaatgcccaggaagccgtaacgcgcaagtttcttgacggtttccaccgggaagcgttcctcctcgtcgacttcctcggcgaggggcttgacctcgttctccgcgaatgcgcgatacatgtcgcgcagcagcagatgctgtttggaaagcgtgaaatccatagttcctcctattaatgtaaggggtttcccctttgcttactgcttgttgtaaacataaaagccgcggccggccttgcggccgagcagcccgccgcgcacatatttgcgcagcagcggatgcgcgcggtatttgctgtcgtgcgtctcttcaaagagcgtatccatgatggcgagaaccacgtcaaggccgatgaggtcgcccagctcgagcgggcccatcggatggttgcagccaaggcgcatagccgcatcgatcccctccgcggaggcgatgccttccgcgtaaaggccaacggcctcgttgatcatggggatgaggatacggttcaccacgaagcccgggcattcctgcacctccaccggctctttgccaatggcccgcgcaaggcgctctgccgtggcgaacgtctccgccgatgtaccgacgccccggatgatctccacgagcttcatcaccgtcgccgggttgaagaaatgcatgccgatgacgcggtccggccgcttcgtcgcggatgcgatgtccgtaatggagatggacgaggtgttgcttgcgaagatcgtctccgccgggcagatgccgtccagctcccggaatacgcttttcttcacgtccgcccgctcaacgatcgcctcaatgacgagcgccgcttccctggcgggtgcgagctccgtcgtaaacgcgatgcgggaaaggattgcgtccgcgtcctcccgtgcgagtttgccgcgcgcgacgcgcttatcgagcccacccgcaaggcgcgcctgcgcgcgcgcaaggatctcgtcgttcacgtcgcgcactgcgacgtggtagcccgcctgcgcgaacgcctgggcaatgtcgaggcccatcgtgcctgcgccagtcacaaagatctgttccatggttactcccctttaaagttctcgcgcggcttcttttccaaaaaggcgcgcatagccatcttttgatcctccgtgttgaaacagaaggagaacaattcttcttccgtcgcaagatccacatcaataaagcggtccacacgcgtgctgatcgcgcgcttgcaggcctgcaccgcaatgggcgcgttgcccgcgatctgcgcggccatttccatggctcgatccatcagctccgcgtccgggtacaccgcgttcacgaggcggatgcgcagcgcctccgaagccgggatcggcttgccggtgaggatgagctgcatcgcataggatgcgccgatcacacgcggcagccgctgcgtgccgccgaagcccggcgtgatgccgagcgtcacctccggctggcccagcttcgcgccctccgcggcaaggcggatgtcgcagcaaagagcaagctccagcccgccgccgagcgcatagccgttgatcgctgcgatgacggggacgcgcaggtcgtcaagcgccttaaacgcgcggtgcgcaacggccgcgaagcgcttcgcgccccttgcgtccaagccggccatctcgccgatgtccgcacccgcgatgaacgccttttcccccatgcccgtgatgatgagcacgcggatggaatcgtccatttcgatctcgcgcagcgcctgctccagttcgatcagcgtttcggtgttgagcgcgttgagcgcgcgcggccggttcacggtgagcacgacggctgcgccgtgccgctccacgagaatattctttctcatattctccatctggttcaaacctccttgcggttataaacagctcaatttggctggcctcccggccttcctaagctatgatatagcattttgcgctgaaagtctcccgttattttaataacgcgcaaggaggtttattttttcacatagcacgctgggcaggcttacttgcccatgccgcgcttgaccatttcctccaccgcgaaggaggcgacgtcgtccgcatacttctgcgggccgaagcctgcgtcgtagccgagttccttggcaagctcgtgcgtgatgcgcgcgccgccgcagatgacgatgaagcggtcgcgcacgccctcggcctccagcagctcgatgagctcggtgaggttctggatgtgcacgtccttctgggtgacggtctgggaaacgaggagcacgtccgcgttgagctccacagctttcttgacgaattcctcgttgggaacctgcgcgcccaggttgtaggcttcgatcatctcatagcgctcgaggccgtaatggcccgcgaagcccttgcggttcatgatcgcgtcgatgcccacggtgtgcgcgtcggtgccggtagaagcgccgaccatcacgaccttgcggccgatgtgctcgcggatatactcgttgcactcctccatctccatcgtggtcgtttccacggcctgcacatggatgtcggtgtaatccaccgtgtgggagcaggagccatacaccacgtagaaggtgtactccgcgtcgaggctctggttgaacgcgacggaaggctccataaggcccatcttcttggcgagaatgcgtgcggcctcggtacccttatcgtcgtttttcaccggcagggtgaagctcatctgcaccttgccgtcgttcatcgtgtcgccgtagggcttgagcttggtcaggtccagcgttttatcaaaatctgctttatgggtgttatacaatccgctgctcatttacttgtcccccttcatcagctcaataaacgggttgaagtagcagtcgtccttctgcacgacgcccgcaaggcccttgccaccgtcgcgggagcgcttgatgtccgcgaacgtgccgcgctcaagcgtgccgaaaaggccgatgtcttccatctcgcccaagagattcgtcgccttggtgagcacctcgttggcgcgcgtctgcatgatgccgccatccttgaacacgagctcgttgccgagatcctgcatggtgcggaagatgtactgcgcgttttcgatggaaagcgcgcggtcgctcatgaacggggtgtggatcgcctcggtgagcatgcccaggaggtgcagcttctggccggtgaggatcgtcaccatgttgaagagcgcgtcctgcacatggccgcggaagatgttgccggtcatgaacttcgtaggcggcatgtacttgagcggcgcgttggggaagatctcgcgcgccatctgcgcctgggcgagttcatagaggaagccgttctccacgtccggggagatctcgaacgcgtggccaaggcccatctgctcctcgggcatgcccgcgcagactgcgaactgttcgttgaggaactgggaagcaagcactgtatgcgcctcttccacggcgtctgctgtggtgaggtagttgtcctcgccggtgttgatgatgacgcccgcgaaggaattgatcacgcgggagaagtattggtcgatgatcgtgcgctgggggttaatgtcacggaagaggatgccgtagagcgcgtcgttgagcatcacgtccaggcgttccaaggcgcccatcgccgcgatttccggcatgcacaggccggagcagtagttgcacaggcggatgtagcgtttttcttccttgccgacctcgtcgagcgccgcgcgcatcaggcggaagttctcctgggtggcgtaggtgccgccgaagccttccgtcgtcgcgccatagggcacgtagtcgaggagggattgtcccgtcgtgcgaatgacggcgatgatatccgcgccctgcttggccgcggccttcgcctgcacgatgtcctcatagatgttgcccgtcgctacgatgacgtaaagatacgggccttccttgtcgccgaattcgcggaggaattcgttgcgctcggccacgttcttgcggatgcgcgccacggtggcttccgctacgggcatgatcgccgcgcggatctctgcagcgctgtgcgcggggagcttggtcaggtcaagttcgcccttgtcgatcgcctcggcgatggcctgcggatccttgccggtttccgcaatggcattgccaatataataggccgcgccgccggcgagcacgccgcggtcaaacagatgatccaccaccacgttgggcagcgggacgtccatctcgttcacattgtcgatgccgagcaggcgacaaaccgcgcgctcgacggtgacggtcgtatgcacgtcgataaagctctgcgtgtcggccgcgatatgcgccgcacttgcccgcgctttgtcgacgagttcccggttcaggttcagtttgctctgcatgttaatcacctttcttcggaaattgtggctgccggcaaaggccggcaaaggcacaaaaacgcgcgtgaaaaatcgctttttcgcgctgccgttcccctgatgaaagcggcgcagcggggatgctgcccgcacccccgcgccgtgccgccggaacttttacttctgcttctgcctgtcggcatagcgatccttgcgcagcagcttcgtcggctcgaggtacttctgctcgatgccatgggcgatgccggcaacgccggtgatctcggccgccttgcgcttgccttcgcagacctcgcagtggcactcgttcgcatagtgctcaggctcggtgtaagtggtgataacgccctcaaagttgcgcaggatcaccttgcgcggcgtctggctgatgacgtactgcggcatgaccggggtcttgccgccgccgcccggcgcgtcgaccacgaaggtcgggatgcagaagccgctggtgtggccgcgcagtgcctccatgatttcgatgcccttggagaccggcgtgcggaagtgggaaaggccgagggacgggtcgcaggcatagatgtaatacgggcggacgcggatgcgcacaagctcgttgacgagcttcttcatcacgtatacgcagtcgttgacgccagcaaggagcacgctctggttgccgagcggcacgcccgcgtcagccagcatcgcggtcgcgcgcgcggcttcctcggtgatctcattggggtggttgaagtgggtgttgagccacacgggatggtgcttcttcaggatcgcgcacagctccggcgtaatgcgctgcggcatgacgaccggcgtgcgggagccgaggcggacgatctccacatgggggatcttgcgcagctcagtcatgatgtaatcgagcatctcgtcgctctgcatcaggcagtcgccgccggaaagcagcacgtcgcgcacctcgggatggttgcgcacatagtcgatgcaggtgtcgatctggttcttggggacggcgcagtcatgctggccggcaaagcgcctgcgggtgcagtggcggcagtacatggagcactggtcggtgatgagcagcagcacgcggtccggatagcggtgcgtaaggcccgggcagggggagtcgatgtcctcatgcagcgggtcagcgtcttcatagggcgcaaaatgcagctcggcatccgtcgggatcgcctgcttgcggatcgggtcatggggatcgtcgaggtcgatcagggaaagatagtacggcgtgatggccatgcgcagcttgccaagcgtcgctttcacgccctcttcctcctcgggagtcaggggcatatgctttttgaggtcttccagcgtttcgatgcggttttcgacttgccaatgccagtcgttccactgggcatcgggcacgtccttaaacatgccgttggctctgctctgtctcat

SEQ ID NO: 526 - DNA, 7907 bp, unidentified
  source 1..7907: mol_type = unassigned DNA
ttatttaccctcgtatgctgcctgaatctcttttttgaactcttcctcgcccactctctgaagagtaagtctgaaacgctcaccaccgtttgcatgcttctcgaagaaactaattgctgcatctgtcactctgaaaagagtttccttgtcgcggataatcgggactagctgctctcctttatagatgtggtttccgaaaagtcctccaaacgatacgatatatcccggagttcccttccatgcatctgtcggacagctctttacgcagcgcgcacagttgttacatttgtctctgtcgatgacaatcctgccatcctccatgctaagtgcaccctcgcggcatgccttcacacatacaccacactggatacaatcgtcatggctgcactctactgtcattccgcccttgattccgacatcgttttcctcagcctttaagcagttgttctgacagcctgtgacaccaaacttgaacttgtgaggaagctctcttccgaagtatctttcatcaagttccttagccagagtgtatgtatcgatacatccgctaggacagatttctgagccctgacacgctgtgacagtacgtactctcggtccgcagacacctgttcctacaccgccctttgccagttcctcttttaccacattgatatcctcaaccttgataaaaggaatctcaataccctgacgcgatgtcatatgaacatatccgtgtccgtatttctcagcaacctctgctactgttttgatattttctgctgtaagatttcctcctacaaccgcaattctaagcgagaaacagcccttttgcttctgtctcatgaaaccgcccttttttagggccgcgtaatcaactttctccgccatttttaatctccttactgtgtaaatatgttaatgttttgttttatatgtaaatgcatatgcacgctctcatttgcatacacattgataccttattatgatggcttaatcagctatatttgcaaaagcctgtgcaaaatcatccttcaggtcatctatatcctcgatacccacactgactcttataagatcctcaaatactcctgcatcctccttctgcttatctgtgctgtgaagactgattgtggagcccggatgaatgacaagtgtctttgtatctccgatattgctgagtgtgtatggaatcgtcaggctgtctataaatttaaatgccttttccttgctgccaaccctgattgtaaggattgctccatagccgtttgtgagctgtttttttgctatttcatgccatttgctgctacaaagccccggataattaacctttatatcaggataattattttctatccacgccgcaagcccgagtgcattagaacattctctttccattctaagaccgagtgtttcaagtcctataatatttaagtatgcattcaccggagctaaacaggcacccatatttctgaaaagactgtttctcagctttgcgacaaatgccataggtccacacttcacataatctgcaaaccccggatatctgttcttgtcccatttgaacttacctgagtctgtcagaataccactgattgcattgctgcttccattgatatatttggaagatgaattgaccacgatatcagctccatgctttaaaacctgtatcaggtaagctgtcgatgtggtattgtcaactacaagcggtatatcatgtgcgtgtgctatctctgcaagcttctcaatatctgtgacatccagacagggattaccgatagtctctgcaaaaatcagtctggtatgctcattgatgctgtcctctatctgctgccagttgttgttctcgacatatctggttgtgatgccgaaggcctcaagatcatggaacaaatctattgtgccaccgtagaggcttgcacttgagattagctcatctccactgcttagtatatttaagaaggtattcatcagtgccgccattcctgatgcgcatgccaccgatgctattcctccctcgagctttgttattctgttctcaaaagctgtaatcgtaggattggcaactcttgtgtaacagtagcccggagctttgttttcaaatattttttccagatctgccgcgctctcctgctcgaaggcgcttgtctgatataccggtggcagtgtagagccatttgtctcttttgtcacgccggcatgaagtaagcttgtattaaatctcattgttttcttcttctcgttaattcttacatagtctattgtgttactaggaattgatgagattattatacaaacgtgtgtgttgaaagtcaatgctatcagttatacaaattatttgtgcgtggttatatattttgtttatagccattaatgtcccttaaatactctgcggctgtcgttgcggcatttgctccgtcagatactgcagttaccacctgacgcagtgtcttggtacggacatctcccgccacatacagtcccggctggacgcttctatcatggtcaccattttttgttgcagcatatgtgatgccgtcctcacctgccactacatatcctctctcatcgagctgcaccagattctttataagctctgactgcggtactgagccatatgccacgaatactccgtctacagccagtgtcctgccacttttaagctttatgcctgctggctttttttctccatatatttctgtcactgtttcgtttaggacaagctctacattttctttctgctttaagagctcaactgtgctctgtgcaccgcggaagctgtctcttctgtgaaccagatagaccttctcacatatatctgacagatataatgcatcatccaaagcggtatctccgccgcccagcactgcggctgtctttcctttatagaatgctccgtcacagattgcgcagtaagatactcccttaccggtatactcatcctctcccggcactcctgcctttctcggatatgctcctgcggtatagatgagcgctcttgcctctgctatcgtgtcatcatcgaatttcactctgtatatctctgattcttctttctcaccattttgcactgcttctatctgcactgcttctttttcgataaattctacatcaagagacactgcatgctccctgaatttttctcccaggtcgtatccgtttatgtttggaagccccagatagttgttcacatttccgctctcagctatctggcctgtcccctcgtattctttttctgctactgccacattcagattggctctctttgcatatattgctgcagacagccctgccggaccactgcctattattattatatcaaacatggaattggttcctttcatcgtccattgaattttttcggtaacttattatatacattatccttaaaaaatacaataataccgcctgcttttataaaacacctttataaaaacaagcggtatcaattttatctatcgtatatacatcctggcctcataaggtctgagcactgacatatcagaggtatccttataatttgaaatcagcacctccatgccctcacactcctttgcaagcggcattggtatctccttgtcaaagaaattgcacacaacaatcatggttttttcttcattctttctgctgtatgcaaaaatattctcatcatcctcaagtaaaagtgtgaatttaccatcaacaaataccggataatcctttctcagctgaacaagcttcttgtagcagctaaagattgaatcagggtcatccacctgtgatttggcatttattttgtcgtaattgtcatttacctttatccaaggtgttcctgtggtgaagccggcatttgccgagtcatcccactgcataggtgtccttgcattgtcacggccctttgcgtaaatggacttcatgatttcatcctttgagtatcctttttcaaggcgctcatggtacatgtttatgatttcacagtccttataatcttcgatattatactgtacatttgtcatgcccagctcctcgccctgatagatgtatggtgtaccctgcatgccgtgcagcaatatagcaagcatctttgcagattccactctgtactccctgtcattgccccatcttgacacgatacgcggcaggtcatgattgtcccagaacagactgttccagccacagttgtagagctcattctgccagtgagccattatctttttgagctttttaaacggaagcggtgcaaggtcccatttctcgccgccctccttctggtcaagccctatgtgctcaaactggaacaccatagaaaactcgctgccatccggattgctgtaaagctttgctcgctctgtgtctgcgccccatgcctcacccacggtaatcaggtcgcccttctggaaggtctccctgctcagttccttaaaatattcctgaagccttggtccgtttatggtgattctcttgtccggctcttttgctatctggtcgattacatcaagtctgaagccgccgactcccttgtccatccaccagagaatcatatcgtagattgctcttctgacctttggattctcccagtttaaatccggctgctccggtaaaaactgatggaaataatactgtccgatttccggcacatattcccatgcgcttccaccgaaacaagccttcatatcacttggcggcacgccttcatctccgtctctccaaatatagtagtcatggtatggattgtccttgctctttttagcctccttgaaccacctgtgctcgtttgaagaatgatttaagacaagatccatcataatccttatattgtgcttctttgcctcgtttatgagctcctccatatcatcgagactgccaaacgtcggatcaatatccctgtaatccgaaatgtcataaccgttgtccgcctgcggtgatttgaataccggcgaaagccatattgcattgattccaagcgtctcaagataatcaagtcttttgatgataccctgtaaatcaccaaagccgtctccgttagaatcctgaaagctctttggataaatctggtaaactaccgcctttttccaccatttttcgttattgtttttgctcattatgccctccttgtctcttcattatctcttttagttatctctttttgtaaaaattcagcctggtttctttaatgctgtatcaaattatgctattttacaagcaccaccaaaacctcacagctttcaagcttaagctcagatgctcccactgaaacagtgctcttttcagcatcatttgtgttggacaaaagcacctttttcacactgccatcaagcctgatttgtacctctttactgccaaaatttgccacaaccagcacgcgcttattttcatcctctctgtaataagccatgatgccatctgtatcctcatatgccggaacacatctgccgtaggtgaacagctccttaaattcatctgactttcgcagtgccacaagccttctgtaatagttcaaaacagatgaaggatccttttcctgcgccgcaacattgatagccttatagttttcattgaccttaagccatggctttgctgtggtaaaaccggcatttgcctcatcactccactgcataggtgtccttgcattatccctgctcatccttccacaggctgcaagtgcctgctcctttgataagcctgctgcaagtgctgccttgtactgatcctttgtgctgatatcgtcatactcatctatactgttccattttgcattttgcataccgatttcctgtccctggtatataaacggaatgcctcgaagcagtacgctgacagttcctaacatctttattccggcaggattttgagcatgctttggtaaaaatcttgaggcacctctcggctcatcatgattttctatgatattggccttaaagccgtacttttctgtctcaagctgtgaaccaagaatggtctttctccatttgtcaaaatctattttcggtgcatcataccagccatgctctccatcacttaagcactgtgcacaaaaatcaaatatcgttgaaaaatgcccattctcaccgataaactccggcagctcctcaggcttcatattgaatacctcgccaaccgtaaatgcatcatacttcttaaatgtattgttctttaattcctctaagagctctccgacaccttctgcactttcaaccatcttgtagcaggcagccagtccgtcctctgcatccggctcaaaatcagggaaatcgagatttttctttatattgattatcgcatctattctaaatcctgacaagcccttatccagccaccagttaatcatctcataaagcttttgtcttagcttttcattctcccagtttaaatccggctgctccttcgcaaacatgtgcagataatacttgtccgtgcccggcaccttctcccagcagcttccgccaaaataagagcggtaattgctcggcggattgccgtttttaccttttctgaaataaaagtaatcagcatactctccatccggatccttaagtgccttttgaaaccattcgtgcttatccgagcagtgatttattaccagatccatgatgatgtgcatatcacgcttctttgcctcggcaaggagctcatcaaactcctccatagtaccgaactcttcagctatcgcatagtaatcagatatgtcatagccctgatccacaaatggcgatttatatatcggagacagccatatgatgtcaattccaagcgattttaaataatccagctttgaaatgatacctcttaaatctcctattccgtcaccgtttgtatccagaaagctctttggataaatctgatatgccaccttgtcatgccaccattttctctccataatgtgtacctcttatctaatcataaattttgcacctatttacatcttgagaactttgtcttgatgtattatactgctattatagaaagtggttagtataaattcttgcaatattttttcattttataacacaatactgctcttataattttaaagggtatagttttaaaagctatggagaaacaacaatatgaaaaacaataatccgcctgccctcgggcagaaagaaaacgcaaagcacggagaagtatttttccccgttcaaaaatatataacaagacttgcagcagattaccctgtcatcactacacactggcacgatgaggcagagctcacactgattacaaagggctcatgcacctatcagattgatttgctcgaatatgaagcaaaggaaggcgatatcatctttatcccgccactgctgctgcattccatttcaataagggactgcgacgaattttactcggaaacgtatgtattccatatcaattttttaggtggaaacaataccgatatatgctcttcaagatatctgactccgctaatcaaccatgagttcgccatgccttacctgattgcaccgaagcatccggcatattcatccctttgcaaatgcttcatgcgcataacaaagctatactccagtcaggaattcggctatgagctggctctaaaggcatttctgcttcaggcaatatttctattgctgcaatacagtgaaaaaaatgctgatttcggtgtcaacacatcctccgataagctcaaaaatgtgctcgattacatcgaggtgcactatgccgaaagcatccaggtttcagagcttgccgggctttgctatttcagtgaataccacttcatgcgtttcttcaaaaaacacatgaacatgacctgcgtgcagtatatcaacaatgtgcgtcttgaaaaatccgtggaacagttcgagcgcggcaacacctcaattttagatgtctcactgtctgtcggatttcacaatctgagctattttcacagggcatttaaaaagaggtatcatatgacacctctttcctttatcaaaagccttgaataa

SEQ ID NO: 527 - DNA, 17777 bp, unidentified
  source 1..17777: mol_type = unassigned DNA
atgaaagtagtaatcctggctggcggccttggcacgcgcatcagcgaagaaagcgtctacaagcccaagccgatgatcgaaatcggcaacatgcccatcctgtggcatatcatgaaggaatattcctactacggctttcacgactttgtcatctgcgcgggctacaagcagcacatgatcaaggagtggttcgcggattacttcctgcataccagcgatattacgtttgatttcacccgcggccagaacgagatgatcgtccacaaccaccacaccgagccgtggaaggtcaccgttgtggacaccggcctcaacacgatgaccggcgggcgcatcaaacgcattcgtccctacatcggcaatgagaccttcatgatgacctacggcgacggcgtctgcgatgtggacattgccaagctggtggcattccaccgcgagaacggcaagatcgccacgctgaccgccgttcagcaggagcagcagaagggcgttctggatattgccgaggataattctgtccgttctttccgtgaaaagaaggccagcgacggcgcgctcatcaacgcgggctatatggtgctggagccgcagattttcgactatctggacggcgacgcctgcgtctttgagcagaagccgctgcagaagctggccgaggagggtcagctgatgagctatatccacaagggcttctggcagtgcatggacaccgcccgcgagaagcaggtcctggagaaaatgcttgccaccggcaacgcgccctggaagaagtgggaggattgatgatggtacattacgatcctgaattttaccgcggcaagcgggtgttcgtcaccggtcacaccggcttcaagggcagctggctctgcaagatgctgctgatggccggggccgaggtcacgggctacagcctgcagccgccgacgcagccgaaccttttctccatcgccggcgtcgaggacaagatgcacagcgtcatcggcgacatccgcgactttgacgcgctgaaggccgcttttgacgcggcgcggcccgacattgtgctgcacctggccgcgcagcccatcgtgcgcgacagctacaaggacccgcgctacacctatgagacgaacgttatgggtacggtcaacctgctggaatgtgtgcggctggccctgcagcagggcagagcgccccgctcggtgctgaacgtcaccaccgacaaggtctaccacaacaacgagtgggcctggggctaccgcgagaacgagccgctggacggtttcgacccctactccaacagcaagagctgctcggagttggcgacgcactcctacatcaacagcttttttgccgataagaccgtggccgtctcgacggcccgcgcgggcaatgtcatcggcggcggcgactttgccaatgaccgcatcatccccgactgcgtccgcgccatggccgcgggccgtaagatcggcgtgcgcaacccctactcgacccgcccgtaccagcatgtgctggagccgctggcggcctacctgctgatcgcccagcgccagtacgaggacagccgctttgcgggctactataatgtaggccccgacgactgcgactgcgtcaccaccggcacgctggtggatctgttctgccgggcctggggcggcgacgccgcctgggagaatcaggccgaggccaatgccccgcacgaggccaacttcctgaagctggactgcagcaagctgaaaacgaccttcggctggacgccgcgctggcacatggccgagtgcatggaaaagaccgtcgccttcagcaagatctggcttgccaacggcgatgtcccggcggagatggaaaaggaaatcaatatttttttggaggaacaataattatgtggaagaacgaggcagaagcccgcgagcagatcaaggcgatggtcgccgagtattatcacgacttcaaggagaaaaagaccccctatcaggagggtgaccgcatcacctacgctgcccgcgtctttgacgagaaggaaatgtgtgccctgactgacgccacgctggacttctggctgacgacgggccgctttgccgaccagttcgagaaggagttcgctaagtggatcggcgttaagttcgcccatctggtcaacagcggttcctccgccaacctgatcgccttcatggcgctgaccgcccccgagctgggtgaccgccagatcaggaagggcgacgagatcatcaccgtggcctgcggcttccccaccaccgtgaccccggccatccagtacggcgcggtgcccgtgtttgtggatgtgaccgtgccccagtacaacatcgacgtcaccaagctcgaggccgccctctcccccaagacgaaggctgtcatgatcgcccacacgctgggtaacccgtttgacctgtccgctgtcaaggcgttctgtgacgcccacaacctgtggctggtcgaggacaactgcgacgcgctgggcacccagtacaccatcaacggcgagacccgattcaccggtacttggggcgacatcggcacgtccagcttctacccgccgcaccacatgacgatgggggagggcggctgcgtttacaccaacaacccgctgctgaaccgcctgatcctctccttccgcgactggggccgcgactgcatctgcccctccggccaggacaacttctgcggccaccgctttgacggtcagttcggcgagctgcccaagggctacgaccacaagtacgtctacagccactttggctataacctcaaggtcaccgacatgcaggccgccatcggctgcgagcagctgaagaagttccccaccttcatcgagcgccgccgccacaactgggaccgcctgcgcgccgcgctggagcccgccgccgacaagctgatcctgccggagccggctgccaacagccgcccgtcctggttcggcttcctgatctccgtcaagccggagagcggtctggaccgcaacgccgtgacacgctatgtggagagccacaacgtgcagacccgtctgctgttcagcggcaacctcatcaagcacccctgctttgaccagatccgcggcaccgacgcctaccgcgtggcgggcgagctgaccaacaccgactttatcatgaacaacaccttctgggtcggcgtttaccccggcatgaccgacgagatgatcgactacatggccaagacgattatcgaggctgtgaatcagtaaaattttgacaatgaggtacagatccctatgatgcagcaaaaggtgaaaacgacccgcgcacccagactgcggttggacaaaaacaggcggctgacgcctatgcagatctactgctgggcgacggtgggctgtctggcggtgctgctgcttgccctgctggccagccgtggtgcgctgctgcatcgattcttcttttatgatgtcaccgataccggtatggactttttccatagtattgagtatacgcgtggacgtatgccctacggacagttcgatacgctgtacccgccgcttgcaaatctgtttttctatgtgttgtatttgcttgtgccaaagacacaatcagctacgtggacggaatcgtttatctcgtctctcaacatgaagggaacagaacgggatttgcgtctacagcaagcgacgatgatgctgtttatcgtctttgttatcgtggtggtcttaggaattgtatcgatgacagaacgcctgacgcgcagctgcggggggcggaaagagctgctggcattctgtgcagtgttcagctatggggtactgtacggcttggaacgcggcaatattctgctgttgtgctggccgttaatggcattttttatcctgtaccgcaattcagaaaacccacttttgcgggaattggcctgtctggcgctggcgattgccgccggtttcaagctgtacccggcgtttctgggcgtgctgttgctgcgcgataaaaactatctggccgcggtgcgcacggtgctgtacggtgttgtctgcctgtgcttcccgctgttcttcttcaatgaaggattgtttggcctgacactgtggttccgtgtactgtttgattttagcggcagcagaggtgaaccgtggatcggcaatggtttctccaacattttggcagaggccggacatgcggtggacaagctgctggacacgcagctgggctatggcagctacgcactgctgggcattgtgctggcagcggtgctgctggtgtgcagcttttttatggataaggagtggaagcgcatcacagcaatcattctggcgatgctgatgttccagtcccagtatgattatgtatggtgcctgtttttgattccgctgttcctgtttatggagcaggagcgtgagctgcgcagggacaacgtgctgccctatctggccttgatggtgccggtgctgccgctgccgctgttccggcgggatcagatggagccgtcctttgtaccgcgcaacacgatttgtcatgtcatgctgctgctgctcattgtctggtgctttgtccagacggtgcagggggtgcgtgtacgctgtgcggaaaagccggtcaagtcggcacacggacacccggcagccacggtgctgctggccgtttgtgtggcggtggccggtgtgggcggccagcagctgtggcagcacacccacaactggggctttgactacagctacaacggccgactggatgccgagggcatccggcagaaggacgtgcaggacagcgacggcaacccggtagaggcaacatggagcggccgcggtgcgtatattatgatttacaaccacgcgccatttacgcaaaggatgacggtcacattccagacaggctacggcatggatttgaagcgcgcctatacgatgacgtttgaagcaccgaatctggaagatgctgatggtacaaccgggaagcagaagcagacggatattaagattgatcatgaggggcagaccgtgtgctacacggtagatgtggttcccggccagacccaaatcgatgtgagctatgacggtccgatggcggtttatgatgcttcttcgcgcaaaaacggcaccttcacggtgacaaacctggcggttgtcagtgagggcgctgtggagaaaaccgaataacggaaggaaacatatactatgcagaaattgctggccctgctgggcgcaaaaaataaagaggaatttgtggagctgttcaagcagttcatcaagttcggcctggtgggcgtaagcaacacggctgtgtccatggcggtctactatatcttcctgtggatcagcccagacctgtatatggtcggcagcatcctgggcacgattctgagcattgccaatgcatttttctggaatgataaatttgtctttaccggcaacgccaatgactggcgcagcaagctcaagcggctgggcaagacctatgtcagttacggcggcacgtcgattttgtccaacgtgctgctctggattgaagttgcattcttcagcgtcagcaagtcaattgcgcccatcgtcaacctgctggtgacgattccgctgaactttgttatcaacaagctgtggacatttaaggaaaaatgagaacaagcacgatgcaattagtaatggaaaaaccacatacgaataagcgccagaacgcgcgaggctgggtattggctgcactgctttgtgtggtgattctggcctattcctcaatttatttcgccaacacgatgcccattacggaaggctggaatgtaaactatgcagagctggtattgcacgggaaatttccataccgcgatttttactattacctgccgccactgaacatcctgattgatgtggtgctctggaagctgtcgtttggcagcctgttcatttatcgtgcgtggtggctggtacagcggattgctatttatgagttgatgtttcggctgctctgccggtatttcaatagatatgccgcctttgcagcgtgtgccttctctgcgattctgtgcacggcctctgtctacgatttatttggtgattataaccagacgattccgtttttgtctgtgttgctgctctattgtgttctgggatttgcagaggcggtagataagaaagccgccgggaaatacctgtttgctgccggcgctatgctggggctgctctttctgaacaagcagacgatttttgtggcggcgggggttatttatctgctggctttgagtgtctactgctggaagaaaaaagacaaaggctttctgcaatattgtgcggcagtcatacttggcttttgctggtgttcgtcgtggccatgggaatccttgccgtcaatggcgcgttgcttccgttctttgagcaggtctttatgcacacgggaggcaaaggcagtccgcttttcattttgatgaaaatctttactggctggacaatcaatgcgccggtatttttactgatggtgggatgtgtaactgccataacactggcgcagaaaaacgagagccagacagcaggacggatgcttttgctgctggtcataggcggcggctatgttttggaaaggcaggctgcgaacgactttatcgaagtgctcgttggtacgaaaagcgtccaagccgttgtcatcggtggagggttgctactgttgctggcgtacagccaaaagcgcagaagcggcagcaagataatgcacgatgtattttacggtctgtgtgccgcctatgtggtgattattctagttacggcccgttatgcgtcattaggcgaagataacgggagctttttggaagcaatctatgaatcaggcacgctgtttaagagtgtgactggtacgctgtatacgatcatcagctttttggatctatatctgattgcccgctcccttatgaaaataaaagcggatggcaatggcggctatgcacgtgagcacttttggatggcctgtgcggcattttctacgatatatgcagccagtatggcatcggcatcagaaatttcctaccatgggatcatgttggctatgccgtttgttctgtgtgttgggctgaacagcgtatttacagataaagttacggaaaaagcggtcaaaatcggtacgattgcgctgtgcacagtactttcgatggcttgtattgcacagaaggtcgtatgttcctattcttggtggggctgtgaacaggcagaacatgacaaaaaaatctacgccaccggcatccccgcactgcgaggcttccgtttttctgcggaggacgacaagatgttggaggaagttacacagctgattcttgacaatacaacagaagatgcaacggtttttggctatccttatgtaaaactgtttaacatcctgacgaaccgctacacgatggatacatttgttccggttctgttctatgacgtggtagacgaccagtacgttttgcaggaggacgagctgctacaggaaaatctgcctgacattgtaatctggaaggatgatgttccaaactgcaagaaagttcacgaagaaagataccgcaatggtgagaaattgaagcagcgtgagctggaaaagaattttggacgactgctgggcacacgctacaccctgttgggcgtgtatggtgaggaaaaaactggtaagatcaaggtgtacaagctggcagacgagacagactggggtagcttcaccttggaaggaaagggaaccgaggaagagccgtatctgattcagtcggcggaggatttgcaggcgttcagcaattatgtcaaccgcggcatgagctttgcagatcagtatgttgaacagaccgctgacattgatatggacggtaaaaaatttacgcccattggtgcattcagcggggaaagctatttttacggcacctataatgggaagggccatgttatctgcaatttgacaatcagaaatgagaacaaggaaaatgtcggtctgtttggccgtctcggcggcgcagtttataaccttggtcttgaaggcggcagcctggatggtgcttgtgtcggtgcaattgccagccatgcagttggcagcgatgcaaggattgtgaactgcttcacagatatggacgttacagccctgcgcgcaggcggaattgcggataacttctccggcagcattgtgaactgtgtcagcgcgggtgtgctgaatggtgaggaaaatgctgctgcaatttcctacaacaatacattgactgtggacagcgtatatcagctggcaggaagtgcatcgagcctgattatgaccccgagcattcaagagcagaatatcagcagtgcagacgcagaagtacttaatagcgactatctggtcaagcgtttgacggcgtacgcacacaatgtgaatgcaaatggattgaagctcaagaaagcaacgagtgaaacaggcggagaagcgctcgaagaagtggaaaattccatcgagcttgtcgaatggacaaagggaacggacggccacccggtattggtccctgaaaattgactaaatggaaaaggagcaacccaatgaaacagcgtttagcggattatgttgccgactttctggcggcacgcggtgtgacggatgttttctctgtcgtgggcggcggcgctatgcacctgaacgatgcgctgggccataacccccggctgcatgtgacctacaaccaccatgagcaggcctgcgccattgcggcggaagcctacgcccggctggaaaataagatcgcggcggtctgtgtgaccaccggccccggcggcaccaacgcgctgaccggcgtcgtgggcggctggctggactccatccccatgttcatcgtctccggccaggtgcgctatgacaccacggcccggtacgccttgcagtacactggtacgccgctgcgcgccatgggcgaccaggagtacgacatcaccaagtccgtccagtacatgacgaagttcgccgccatgctggaggaccccaaggacattcgctacctgctggaaaaggcgtggcatctggctacaacgggccgccccggcccggtctggctggacatcccggtcaacttccagggcggctacattgagactgacgagctgcgcggctacgaccccgccgaggatgacgcccagctgcccccgccggtggacgacgccacgatccggacgattctggaaaaaatcaagaacgccaaacggccagtgttccacgcgggctatggcatccgcctgtccggcgggtatgcggcgttccgctccgtggcggaaaagctcaacatccccatcgtcacctactggaacgccgtggacctcatcgaggatgacaatccgctgtactgcgggcgcgccggcaacatgggtgaccgcccgggcaactgggctatccaaaacgcagacttgattctggccgtaggcacgcgcatttctatccgccaggttggctacaactggaagacctgggcccgtgcggcagaggtcatcatggtggacattgaccaggccgagctgaaaaagccgaccctgcacgtcgaaatgccggtctgggccgacgcgaaggactttttgaccaagctggataaggtcgccgcggcccccgtgaacgcgggcggcgagtggctggccacctgccagcgctggaaacgcgactaccctgccgtgttgccccgccagtgggaggaaaacggcgagaccgccaacgtctacgcctttgtgcgctatttaagcagtcgcctgccggagaacagcctgaccgcggtctccaacggtgcgtgctgtgtcgtcggtaaccaggcgtatgtcatccagaagggcagccggatggcaaacaacagcgccattgccagcatgggctacggtctgcccgcagccattggcacctgcatcggcggcggacgccgccagacgatctgccttgagggcgacggctccatcatgatgaacctgcaggaactgcagaccatcctgacgaacaagctgccgatcaaaatcttcctcatcaacaacaacggttaccactctatccgcctgacgcagaacaaccttttcaaggagcactgcaaggtcggcatcggccccgagagcggcgacctgtccttcccggagtttgaaaagattgcaaaggcgtttggctacccctactacagcgcccacagcaacgccgagatgaagcaggccgtggacacggtgctggcactggacggcccggctttctgcgagattttcaccgacacgaaacaggtctgggagcccaagagcagcaccaagcgcctgcccgacggcacgctggtcagccccccgttggaggacctggcccccttcctgccgcgtgaggaactggaaaagcagatgttcatcccgctgatgccggaagtgtaagggagtgcgtgattcaaaaatggcaagcattcaaagacaaatccacaccgccatcatcaccggccctacgggggcaatcgggatggcgctgtgtgcaaagctgctggcggagggcgtgacggtttacgcggtcacccacccgggcagtgcgcgggcggcgctgctgccgcaggacgcgcggctgcatgtggtgccctgcgatgcggcggagttggccgcgctgccggagctgatcccggaaaaggccgatgcgttcttccactttgcgtgggcgcacacgatcggcccgggccgcaacgacatgccggcgcagatcgagaacatccgctacaccattgcggcctgccgcgccgcggcgcagctgggctgccaggtctttatcggggctggcagccaggccgagtatggccgcgtggagggtgtgctgaccgcgcagaccccctgcttcccggagaacggctacggcatggccaagctgtgcgccggccagatgagccgcgtcgagtgccagacgctgggcgtggcccacatctggacgcgcattttgagcgtctacggcccgcacgacggtccggccacgatgatcagcggaaccatccgtaagctgctgcacggcgagaagcccgctctgaccgcgggtatccagcagtgggactacctgtacgccgccgacgcggcagctgcgttctacgcgctggccgtcagcgggcaggacggcagagtctacccgctgggcagcggcacggcccgcccgctgaaggactacatcgaggcgctgcgggacgccatcgacccggcgctgccgctgggcttgggggaggtcccctacggcccgctgcaggtcatgcacctgcaggcggacacgtcggccttacaggaggacaccggctggcggcccgcgaccccgtttgaagaaggaatccgcgaaaccattgagtgggtaaggaaagagacaaaatgagtgagaaaaagacgatttcggtaatgatcccctgctacaacgaggagcagaacgcccgccccatctatgaggctgtgcgcgatgagctggtcaagagctgcccgaactacgactatgagattttgttcatcgacaataagagcgaggacggcacccgtgccatcatccggcagatctgcgccgaggacaagcacgtcaaggccatcttcaacgtcaagaacttcggccagttcaacagcccgtactacggcatgatccacacctctggtgattgcacgatcacgatgtgcgccgacttccaggaccctgtggagatgatccccaggtttgtggccgagtgggaaaagggctacaaaatcgtcattggccgcaagacccagagcaaggaaaacccggtcatgtactggctgcgcggctgctactacaagctcatcaagaagatgagcagctgtgagcagatcgagcagttcaccggctttggcctgtacgacaagagctttatccagacgctgcgcaacctgaaggacccgacgcccttcatccgcggcattgtggccgagctgggccccgagcgcaaggaaatcgagtacacccagccccagcgccgcgcgggcaagacccacaacaactggtacagcctgtacgacgctgccatgctgagctttaccagctacaccaaggccggtatgcgcattgcaacgttcgcgggcttcctggtggcggggctgagctttctggtcggcctgttctatctgattgccaagctgctgttctggcagagcttccgcgccgggtacgcgccgacgatgatcgccatcttctttatgggcggtattcagctggcgttcctgggctttttgggtgagtacgtcatggctatgaacacccgcatcatgaaccgcccgctcgttgtggaggaagaacgcctcaactttggtccggacgaccggtgaccggcatgaagcaggagcttggttatttcctgaaaaacgcgaaattccgcgcggcgctggggctgaccctgctgctcagctacggctatgccatcgccacgacacgggtcagcattgactcgctggaaggggaccgctacatcggcacgggcggcgtcatgctgtccaccggacggttcggcatgaacctctgggccgcggtgctgggctacggcagggccgagccgagctatgcctttggcattgacctgctggcggcgctgctgctggcgctggcggcggtgagcttctgtgcgctgctgcgcaaggccgcgcaggaccgcatcagcatgttcggctatgggctgtttgcctgcctgtttgtctcctacccgctgatgaacgaaatttgggagtacagcggcgcgaatgtctgcgtctgcggcggctatttgctggacgctactgcgctgaatctgctgtgggacgcgcgccagcccggcgtgccgtggcgcggcagggctctgcgcatgtgcgcggcggcgctctgcctgatggtggtctgctcgtcctatgagtcactggcggcggtgtatgtgctggctgtctttgcgcttttaacgctggagcagctactggccgccgagcgcccgcggcttgcggcagtcctgaccgagggaatgtggtacgcggcggcgctggtcggcggtctctgcctgcgcgtgctggtgacgtcgggcatccatcttgtgctgccgcaggctgcggccaacggcgccaccgaaattttgtgggcgttctacccatttgtctatcttgcaaagctgcttgtcaagggcattctgattaactacgcactgcgcggctgtttctacctgcccattgctgaattggcggtggcggtgccagtgtttgttgctctggtcatcgtgctggcggtgcgcaaaaagcggcccctgctgctgctcaccggtgcgggaatgctgctctcactggtgctgctgtcgtttgtgcaggggcggtactcgccctaccgcacctgccaggtgtttgcgctgtttgtggcgctggcggggctggccgtgtatgagctgctgcgccgcgctgcggcccggcgggctatgctgctgggcagcgtgcagctgctggcggtgctgctctgtctgcaccaggccatgtacctgaaccatctgctggccgtcgattaccagcgttccgagcaggaggccgccgtggtgcgcactctgggcaccgagcttgtgcgcgactacggcaccgacaagcccgtggtgctggtgggccgttacacgctgggggagaatatcacccggtacacgacggctgacccgatgcagcacccgctgtaccgcttcttccgtgagcacacgagctgggagagcggcgacaccgtcaagtacgtcgacaccaactgcaactcggtgctgaactggtcggtcacggccttctccgaggtggacgacgtctacggccaggcagcggagcacctgttccgctactatggctttgctttggacatgacccacagcgctgccctgcatgagcaggcgcagacctacgccgacgcccacgacctgccgggatacccccgggcgggggcgattgtcgattgcggggactatgtgctggtaaatctgcaataagaataccgcggaaaagtttgcgcttctccgcggtttttgctttctttctgtattttgccgatgttttcagccggtcacggtctcaaagggcttcgtcaggtgcccgttcctgtcggcctcgcaggcgcggcgggcctacttcaaatactccaccaaaaacgccactgtcgtctcccgcagcgctttgtccagcgcggcggcggtggcggcgtcctcggatagatagttgtggttcccctcggcaaacggctccagcacggccctgccgtcgggcaggctctcgacggcggctatcgtctcggcctgggtcgtgtcgctcaaaatgccctcatggccggtgtaggtcaaaagcgtcggcagggcgctctcccgcagggcggcgttcgggtcggaatcgcgcatttcggtgaacagcgttccgctgacatcgacgccccaggtgctgatgctgccgctcgcctcggcctcagcggccagcgcttccacggcggaaaagtcgtcgatgttcaaaaactccatgccgcgcaggcccgcgccgttggcggggctccacagcgccagcgccgtgatgccgcccctgcgctgcgggtagaggctggccagccgtccgcccatgctgtgacccaccagcgctgtgcggcccgtgccgtaggtctgctgcatgtaggtgatggcgctctcgacgtcgtcggtcatgttggacagcgtgtaggccgtgaacggctcggtgctgttgccgcagccgggaaaatccagccgcaccgtcgcaatgccctgggcggccagatcggcggccagcggcgcaaagtggccgtcgccgctgcggctgccggtaaagccatggcagagcacgacgagcggcagctcctccccgcgggccagcttgccgggcagctgtaccgtggcgtaaatgtccccgcgcgtgccgggtatggtgacgtcctgcgctttcggtgcgggcgtcagcagaaagagtgatgccgccacgcagagcgccagcgcggcaatgcagcctgcaaggatataaaaagcgcgtttatgcgtttgtttgtgcatagaattacctccgtaatgcctctattaaagcctatgcggggcaaaaagtcaagacgcacagaatacacacaaaaaaacaggtgacaaacccggggcggatgtggtatactaaagattacaaattggttaaaaagtcagacccggggcgcaggcgcagccttgccccggcttttgtcctgttttaccggaggtgcttgactacgaattctatagcgaaccgtatcccccgcctgctggctatgctgtttgtgctgctggggctgttctgcgcggcggcactgcccgcccatgcggaggactacgacacggtgctggaccgcctgtcccgcctgcaggcgctggcgcgggagtactcggccggtcaggccgacacgcccgacccgatcgagctgacgctggcctacacccgcacgggggagtacaactccacgatctggcagctgaccgccggtgtgcgcgacgccgggtttgagagctacgtcaacagcagcgaccccgagctggcgtcgctgcagaatatgaacaccgtcgtcctgcccaacggagaaagcatcgactttgggcacctgctggcgtcgatgaaccttgtctacaacggcatacccatcacgggcagctggggcggcgactgtgaggagctggccaggcagtattacggccaggccggcgatgccgcgggctacgccgaggcgatgcgcgcttcctttaatatagacgatgacggcacgctgagccgcttcagcaacggggacctgcgggcggacctcgactccgtcgtcgtcggctccaaggtgacaaaggacaccgacctggccgaggcgctgcgcagctactacgcgaatctgaccgagtatgaccgcgtcaaggagttcatctcgctgagcttcggcacggtggatacctcgagcaaggcctttgcggacgccgtgtacagcgctctgctggaggattccggtatgcagctgctgttctacatgaacggtatgtggaccgtcaagggctggcagatcaaggacgactacgcccccgccgtgcgcggcgcaacagacctgtttgccgagtacctggccaacgcggtcaatcacgagaagatcaagagcgagacgaatgaccgtctggttgccatgggcgggcaggcactggccgacgcgctggaggcgttgggcgacaccgacgccgcccaggccgcactgaccgccgccgaggagatggccaataacgcccaatcgacggtttcctccggttcggatgtggtctccgccgcgcgggagaatttgcagacaaactttaacgtgaaggtcttccagctgattttgctgattgcggcagggctggcagcgttcatgctggtgttcagcatggtgatgtttgtagtgcaccgaaaagaaaattgagtttggactgcgtgccgctctcttgtgggaaagagagcggcacgctttttctgttcacaccccgttcacattccgtatattcaccccgagttatccacggcgtataacggttatccaccgtggaaatgttgaaaactccgtggaaagcgtggaaaactctgccgcccggacccgttcaaaagcggaaaaccgggaaaatctacgtagaaaaaacgtttattttccacattttccacagcgacgctgttgaaaactgtggaaagccgggggaaaacgcgaattgcgctttttgcaacacaaaatacacgttttgtaaataagggcttgcactcgccgcgcgacagcgctataataaacctaatcatcacccgcactgctgtgcggcggtgcgcttgagtataaaagggagagtgtgaaattatgttggacattaaaatcaccaaaacgacccatccgaaggaaaagccgcaggacgagtcgaagctcggcttcggcaagcagttcagcgaccacatgttcctgatggactataccgcgggcgagggctggcatgacgcccgcatcgtcccctatggcccgtgggagatggacccggctaccaccgtgttccactacgcacaggaaatttttgagggcatgaaggcctaccgcaccgcggacggcaagatccagctgttccgccccgactgcaacgcgaaccgttttaatgattccgcggaccgtctcggcatgccccccatcccgccagaggacttcgtgcaggctgtcaaggcgctggtcgatgtggaccgcgactgggtgccccactccgacggtgcgtccctgtacatccgcccgttctgcatcgctaccgatgtgggcctgggcgttcatgccgccaagcattaccgctttgccatcatctgcgcgccctccggtgcctactacgccgagggcctcgaccccgtccgcatctatgttgaggatgagtacatccgcgccgccccgggcctgaccggctttacgaagtgcggcggcaactacgccgcgtctatcaaggccggcgagctggccgaggagcgcggcttctcccaggtgctgtggctggacggcgttgagaagaagtacgtcgaggaagtcggctccatgaacatcatgttcaagatcgacggcgagatctacactgccccctgcgtgggcaccgttctgcccggcgtcacccgccgctccatcatcgagctgctgaaggactggggctacaaggtgcatgaggagcgtgttgccattgccgacatcatgaaggctgccgacgagggcaagctggaggaagtctttggcaccggcacggctgccgttgtctcccctgtcaaggagctggattgggagggcaaggttgcccacatcagcggcggccacatcggcgagctgacccagaagctgtatgacacgctgaccggcatccagtggggcaagctgcccgacaccaagggctggatcgttcctgtggaataa

SEQ ID NO: 528 - DNA, 7534 bp, unidentified
  source 1..7534: mol_type = unassigned DNA
atgttaaactatagtgttgcggaattaaggaagagattgattaataaagtattcaattggtattttggcagacgagccctcccctattggttggtggttattttcgatttgctaacgtgctttgtaggtggactactcatggtgtggatgcgccatccgcttacagaaatgttgcaacatttgccagagttactccatacattcctaatgtttgcagtgttcaacctcattgggtttagagcattccacacttattctggcattctgcgatactctcagttcgtagacctcatgcgtgtggtgtgtgccaatggtgtatcgcttattatggcattggggctcaacttccttatttgccacaaccattggcatggcacattttatgcccttaccggacgaatgactttggtggtttaccttggcacgatgactttgatgtgcttgagccgcgtcattgtgaaattgttatttgaccaagcattgatgggtaaaaccgcacaaaacacctttgtgtatggaacacaagccggtgcagtagccttgacaaactatgcatatagcatcaagcctacacagtttatcatcaagggctatatgggcgatgaagatagctacaataatcagcgactcatgggtaaaaagatttattctatccatgacaacttggctaccgtgcttaaagacagaggtatcactgccgtattggtaagtccgctgaagcacgatgactttttgaaaaacaaaaagttgcaagacttgctgattgagaatggtgtaaaaatatacgtctcgcaaaatgcaaaagaacttgtcaaagatggcaaggtgcaaggcgaagtgcatctgcgcgaagtgagaatcgaagacttgctctcgcgcgacgaaatcccaataaacctcaagtcgattaagcaaaacttaaaagacaagagggtgcttatcacgggttcggctggtagcattggttctgaaattgtgcgacaagtcgcatcgtttgaacctgcagaaatggtacttattgacgctgccgaaactccccaacacgacattcgcttgatgatgcgcaacaagttccccaacatcaaagccgaaaccattgtaaccaatatttgcaaggaaaaacgaatggaggaaatctttaaatcgtttaaacccgatttcgttttccatgctgcggcttacaaacacgtgcccatgatggaggataaccccagcgaaagtgtgcaaaacaatgtgtggggcacaaaaatcattgctgaccttagcgtgaaatatggcgtaaagaagtttgtaatgttttcgaccgataaagctgtgaaccccaccaacgtaatgggatgctctaagcgcatttgcgaaatctatgtgcaaagcctcaacaaggcgattcaagagggcaaggtaaaaggtgtcacacagtttgttaccacccgttttggcaacgtgcttggctctaacggctcggttatccccttgttccgcaaacagcttgctgcaggtggtccacttacagttacacacccaaaaattattcgcttcttcatgctaattcctgaggcatgtaagttggtgctcgaagctggtattcatggcaagggcggcgaaatttatgtgttcgacatgggcgaccccgtacgcattgctgatttggcaaaacgcatgattcaacttagcggtgccaagaacgtagaaataaaatacacgggattgcgcgaaggtgaaaaactctacgaagaggtgctcaacgaaaacgagaatacgcttccatcattccatcctaaaattcgcattgcgttagtacgcaattacgaatacgaagatgcagaacgcgaactcgaagaattgcacaacatctcacttcaatacgacgatatggaaaccgtaaagaagatgaaagaaattgtgcctgaatacatcagtaagcactcgcgttatgaggcactcgaccctaaaaaagaagaggcttaaaacaagatttctataaaagttcgagagcttgactccgactttcaaacgaattacaccgaagagtggaacaccgtttataatttttaaaacggttttccactttttttttgctttatacaccctcaatattcaagggtttacattaaatttgcactacaatcaaacaaaaaaacaagcaatatgaagaaagcattctactgtgtacccgctttgctctgtatggctttggctattcccgtgcaaggcaaccgcacctacacccacaaccatgtggctgtagccgacaccgttgtaaccgacgactctatggacatggaatataccgaggacgacgattgggcaggcacgaacgataacacagctatcgactctgtggctgaagattcagacactgatattttttgtccatacaacgacgaactactgagcgaatatagcaacaaaagtgccgactttaatctgcaaaatagtaccgatgccaatcaaggtgtatcgtttgacgcttcactctttgtgcctaatgccgatagcaaaggcgaagctaaaaagggaggcgcatatagcttaatggttagcaacattcttacaggtacactcgactcgattaacgcaagcaagtggaaaattaattcactcgaaaaaatgcttgaagctaagtggaatgcggtgaaggtgggttaccaaaacgaccaaaacgaaaccaaagctttctgccaaaaagatggcgtagaatataacccgacttcctattcataccgcaccagtgttacacctgtgtggagttggacaaacaagggcatcactacctatagcattgaagacgaatgctacacaggtggtgcacacggcatgctgtttcactattacttcagcattaacaccaaagaagattgcttaatgggattgacagacatcttcaagtccgaagccttaagcgaagtctttaaattggtaggcgagaaactcaaaacatgtccgcaagctgcacaagaccaagaaacttggccagctatagcggaggtagttcctgccccttcggcagacgactattctgttcgcaccggacaaatggaacagtaccaaggcaaatggtatccacgtcccgcagtaacagaatgcggcattgtgttcacttatccgccctatatcaaaaattgctacgctgctggcaccatcaatattgtgttgagcaacgaagaagttaaaaactggttgaaataatgaaacataaaatagccactatgcttatagcagcatcatcggcactcggtgccgcagcacaaactaccgacaattttaaatataccgatgagaaatttgccgacattcaaatgcttcgttacaaagtagagggattcgacaaactcacactgaaggagaaaacatttatttattacttacaagaggctgcccttgaaggtcgtgacattctcttcgaccaaaacggacgttataatttgcgcattcgtgctttgctcgaagctgtgtatacaaactacacaggaaagcacgatgacaaattttacaaagcacttgccgtatacttaaaacgtgtgtggttctcatcaggcatacaccatcactatggttgcgaaaagttcttgcccgattttacggaacaagaattgcgtaatgctctcaacaagattccggcagacaagttaccgctcaacggacaaagtctcgatgccttttgcaacgaacttttccccgtaatcttcaatcccgaagtgatgtctatgcgcgtgaatcaaaaggatggcgaggacttgatacaaacctctgcttgcaactattatgcaccaggcattacacaagccgaggctgaggagttttatgcacaacgcaaaccaaccaacgacccttaccccattatgatgggtatgaatagccgtcttgaacgcaacgactatggcatgcttaccgaacgtgtgtggcgtgtgggaggtatgtataccgcagccatcgaacgcattgtcgacaatctgttaaaagcacgcccctttgccgacacgcccgaacaacaaaaggtaatcgacctcttggttgaaacctatcgcacgggcgacctccgcactttcgatgattactctatccattggctcaaagacactaagagcatggttgactttaccaactatttcaccgaatcgtatggagaccctctcggcatgaaggcttcgtgggaggcgattgtcaacttcaaagacattgcagcgactgaacgcacaaagaagctctctgaaaacgcacagtggtttgaagacaactcacccgtagcccccgaatttaaaaaggaaaaggttaagggtgtttcggctaaggttatcactgctgccatcttggggggcgacctctacccttctactgccatcggtattaacttgcctaactcagactgggttcgtcgcgaatttggttcaaagagtgtaaccattggcaaccttaccgatgcttacaacaaggcttcgcacggcagtggcatggacaaggaatttgtgattgacgatgctacacgcgctcttattaacaagtatggcgatgcttgcgacgacttgcacacggacttgcacgaatgcttaggacatggtagtggcaaactccttcctaccaccgaccccgactctctcaaggcttatggatcgactattgaggaagcgcgcgccgacctctttgggctttactatgtagccgaccaaaagcttgtagatttaggtcttacaccgaacctcgaagcctacaagagccaatattacacctacatgatgaatggtttgatgacacaacttgtacgcattaaaccaggcaataacattgaggaggctcacatgcgtaatcgtgcacttattgcgcgttgggcatacgagcatggcaaagccaataaggtggttgaattggtgaaaaagcatggcaagacttatgtaaaaatcaacgattatgctgccttgcgcaatctctttggtaaactcttaggcgaaattcagcgcatcaagagcgaaggtgattataacggagcacgtgatttggttgaagagtatggtgtaaagattgaccctgtgttgcacaaagaaattcttacacgctacgaaaagttgcacctctcaccctataagggctttatcaatcctgtgtatcacgctgaacgcgatgcacaaggcaacattaccaacgtaactatcgactacaccgaaagctacgaccaccaaatgttgcgatatagccatgactatgccacactccccttggttaatgaataatacttgtgttttaaaatcacatgattatgacaaagaacgaggaaaattggcaacgcaactatttgcaacttaaagagtttgtgaaaatccacggaagtttacccaacaagaaaaaagtggaaaaacgtggtttactaaattggtggaaatataaccaaaaactcattaagcttgataaaataacacaggagcgcaaacagttgttgcaagaaaacagcgatatgcggtttagcaaaaataaataacttttgggggctatacgcacaattatcaaagccctactaccgcatataaaaataccaaaagcaagcattgctcgcacatataccctacagaatgtatatagcgaagcaatgcttgctttgtttattaactaaatctacattgagacgaaaaaattatgccttatcaagtgcttgcttcaaatcgtcaataatatcatcaatgtgctcaatgccgatgctcaaacgcactgttgagggggtgatatgctgttgtgcaagttcctcgggcgacatctgagagtgtgtggtggtataagggtgaattaccaaactctttacatctgccacgttggcaagcaacgagaaaatcttcaagctatcgcagaagcgccaagcctcttccttgccaccttttatttcgaaagtaaagatgctaccagccccattagggaagtatttttcgtagagcgcatggtcaggatgggtaggcagcgagggatgatttaccttagccactttaggatggtgcgccaagaaatctaccacctttaaagcattttgcacatgacgttctacacgcagtgaaagcgtttcaagaccttgcaacaaaataaaggcattgaacggagagattgttgcacccgtgtcgcgcaatatcacggcacgaatacgagtcacaaaagctgctttacctgccacgtcagcaaacacagcaccatgataagaagggtcgggctttgccaaagttggatacttgtcagcattagctttccaatcgaaagtacccccatctacaatcacaccgcccaaacttgaaccatgaccgccaataaactttgtagcagagtgaaccacaatgtctgccccatgctctataggacgaattaagaaaggcgtgccaaaggtgttatctacaataaaaggaatgtgatgacgatgtgccacctctgccacagcttccaagtttgttacgtctgagttaggattaccaaaggtttcggcatataccaccttggtgttaggctgaatggctgcttcgagtgcttcaatatcgttcacattcacaattgtgtgcgacacgccctgcgtttttagtgtgtgcgtaatcaagttgaacgaaccgccatacaaattgtcggcagccacaatatggtcaccattttgcacaatgttttgcaaagcatacgtcacggcagcagcaccacttgccacagctaaacctgccacaccaccttcaagggctgctacacgattctcaaacacgccctgggtggaattagtaagtctaccatatatattgcccgcatctctcaatccgaaacgatcggcagcatgctgcgaattgcgaaaaacataagaggtggtttgataaataggcacagcacgtgcatcggttgcaaggtcgggctgttcttggcctacatgtacttgaagggtctcgaagtgataattcttttcgctcataatattttagtttttgttgttattattttcgcttgcaaagttacggcgtttagtgaaaagcaccaaacaattttaaaaagtaggaaaatattactatctttgccacttataaaagaaatatcacaaagtatgaagccagaaaataaccccgttgtagaaaatatcactatcgacgatgtcgacataaaaattttgcgacagttacaagtcaacgcacgattatctataaaagagattgctgccaacgtaaaccttagcaccacgcctgtttacgaacgcatcaagcgtcttcagcgcgatggcattatcagtcaatacattgctgtgctcaatgccgaaaagctcaaccgaggctttgtggtgttctgttctgtaaagatgaacagactgagccgcgacattgcccaaaactttgcacagaccatttctgccattcctgaggttacggagtgttacaatatttcggggcaatacgattatttattaaagattcatgcccccaacatgaagtattatcaagaatttgtgcttaatgttctcggcaccatcgaacatctcggctccctcgaaagcacctttgttatggacgaaattaaacacgaatatggtgttagcatttag

SEQ ID NO: 529 - DNA, 5735 bp, unidentified
  source 1..5735: mol_type = unassigned DNA
ctattcagtcttctccttcaggtattcataaaaagtatattgtgaacgtactttttccttttgtggatgagctgatttccaacagttacgcagattctcatctacaaaacaggctttacgcttatctgagagctggatagaaagcatatctatcagttcctgctttgcatccgggtccagtatgggggtgacggcctcgatgcgacggtacaggttacgccgcatccagtccggtgagccgaggaatagtttcggatttcctccattaccgaaataccatatacgtgcgtgttccagaaatgtatccacaatacgtgtgacacgaatgttacgactgtatgtttgccccggtatcaggcagcagatgccacggacgatcaggtctatttccacaccggcttgcgaggcttcatacagacggtttatcatggtaggatcttgcagtgcattcatctttagtatgatgcgaccggcttttccttttttcgccagctccatttcatgatcaatcagacggttcagttccggtatcaggttaaaacgggctaccagtaagcggtggaacttcagattctctttaccttgcagggtacggaacaagttgtacagatcgttcacgatgatccggttacaggtaaatagaccactgtctgcgtagagcgtagcagtcttttcattgaagttaccggtgctgatataggcataactggttagttttttcccttctgcgtcgcgccgaagaacgagggcaaccttggcatgtacctttaatttaggaatactatatatgatattaatgcccgaagctttcatcatttcagcagtggcaaggttgttttcttcgtcgaagcgggctttcagttccacaaaaacagtaacctttttgccattctgtgcggcggctatcagagtgttgattacagctgagttctcggcaacccggtattgtgttaccatgatttcacgcacggtaggttcgtgtacggcttcgtacaggaagtggatgaaatgttcgaatgaatggtaaggataatgtagtagcaaatcctttttctccacatagcggaatatggattcccgttcatcaaggcaggtcagtttcatcggttgcggcttccgtatagggtgtatattggggttgggattaggcaaatggcgtaagtcttccaggttgaggtgcttgtctcccggaaccaactcgcggcggtcgatatggaaagcgtctaccaggaaatcaagaaaatcctgcggcatggcacggtcgtacacaaagcggcatacatctcctatcttgcgtttctttactttagtctttacctgttcgatgatttcggaagtgttggcggcatcgtctatcagtatatccgcatcgcgagaaatcttgatgcaataactgctttctacatcatagcccgggaagataacatccagattagccttgatgatatcctctatgaacatcagataatagttgtttcctactttgggcaactctatgaaacgtggaactttgctgtacggctgtttcattacgaaatattgcgtacgtcccggagcaccgggtggcaatcctttctgttgaagacggacggcaagatacagacggttgtcgcgcagaaatgaaatgaccttgtccttggacaccggcacaggttgcaggaacgggaaaatctcttcccggaagaaacgacgtacgaagtcgtgatggaagggttccacatttcggctctgatagaaaatgatatgatttttcttcagggcaggaagtatcttttgctcgtagatacggatacggtcctccatttggcggtttacttcaaggtttatcgcatccaccagttcgatggtagactgtacggtttcctcgtcactttgtgcagcaccggtagctattgctttatggtcggcaacgcgtattttgtagaattcttccaggttggaagaataaatggatataaagttaatgcgttcatacagaggcaaggtgtcatcttccgcttccaacagaacacggtaattgaatgacagccaactaatgtcccgtttaaaatattgatattggttttccatactcatcaagattttcccaaatatagttacctttgcacagataaacaaaagaaagatgacaaaagttggtttattatccgatacacacggatattgggatgaaaagtatctgcaatatttcgaaacgtgtgatgaaatctggcatgccggtgacatcggttcgctggaagtggcgcagaagttggcggcattccgtcctttccgtgccgtgtatggcaacattgacgggcaagacatccgtcaggtctatccgcaaatcaatcgttttactattgacggtgccgaagtgttgataaaacatattggcggctatccgggcaattacgatccttccatacggggaagcattctggtgcgtccgcccaaacttttcattagcggacattctcatatattgaaagtgaagtatgacaaaacactggatatgctgcacatcaatccgggtgccgcaggtatttccggattccataaggtacgcacaatggtccgtttcattgttgacaatggagtgttcaaggatcttgaagtaatagagttggcaggttgagaaagctcctaaaaataaattaaattattttgtactacatttgctttgcattatctttgcggcttgaatagcaaattgagagccgtggggcttggtcctccttcttattttattctatatttgtatcaaccgaaaaaagaactgaaatatgaaaggaattattcttgccggtggtagcgccacccgcctttaccccttatcaaaggctatttccaagcagattatgccggtttatgacaagccgatgatttactatccgctttccacgcttatgttggcggggatacgcgaagtgttgattatttccactccacgtgacttacccatgtttcgcgaattgctcggtacgggtgaagagctcggaatgtccttctcttataagatacaggagaaacctaacggactggcacaggcttttgtcctgggtgccgagtttttgaacggtgaaccgggatgtcttatcctaggtgataatatgttctacggtcagggcttctctgctatgttgaagcgtgccgcttcgatagaaaaaggcgcatgtatcttcggctattatgtaaaggacccacgtgcctatggcgtggtggtattcgatgccgacggcaaagccatttcgctcgaagagaagcctgcgcaacccaaaagcaactatgccgtgcccggtctttatttctatgactctactgtcactgccaaggctgccgctttgaaaccatctgcccgtggcgaatatgaaatcaccgatcttaaccgcttgtatctggatgaaggcactctgaaagtagaaatcttcggccgtggtttcgcatggctcgatacgggtaactgcgacagtctgctggaagcaagcaactttgtggctaccatacagaaccgacaaggtttccgcgtcagctgtatcgaagaaatagcctggcgcaaaggttggatagatgccgatcagttatatcgtcttggtgaacaactcggcaaaacggaatacggtacatacctgatggaacttgccaattctcaccgttgagaaaatcataaattataaattataaatcataaatcaatgaagacttatctcgtaaccggtgcagccgggtttattggcgcgaattatatcaagcacattctggcaaagcatgatgatgtcaagcttgtgatactggatgctttgacttatgccggcaacctcggtaccatcgccaaagacattgatgatgaacgttgtatctttgtgaagggtgacatttgcgaccgtgtattggctgacgaactgtttgccaagttcaaattcgactatgtggtgaactttgccgctgagagtcatgtagaccgcagtattgaaaatccgcagcttttcctggttactaacattctgggtacgcagaacctgctggatgcagcgcgtcgtgcctgggtgacgggtaaggatgaaaatggttatcctacctggcgcaagggtgtacgctatcatcaggtttctaccgatgaagtgtatggctcattgggtgccgaaggatacttcacagagcaaactccgctttgcccgcacagtccttacagtgcttccaaaacaagtgccgatatggtggttatggcttatcatgatacgtataagatgccggtaaccattacccgctgctccaataactacggtccgtatcatttccccgaaaagttgattccgctgattatcaagaatattctggaaggaaagaagcttcctgtttatggtgacggtagcaatgtgcgcgactggttgtatgtggaagaccactgcaaagctatcgacctggtagttcgcgaaggcgtagaaggtgaagtctacaatgtaggcggtcataatgaaaagaccaacctcgaaatcgtgaagttaactattgccactatccaccgattgatgacggagaaaccggaatatcgtgaagttctgaagaagaaagtgaaggatgaagacggtcagattgatatcagctggattaatgaagacctgataaccttcgtgaaagaccgtctcggccatgaccagcgatatgccattgatccggcaaagatcactgccgctttaggctggtatcccgaaacgaaattcgaagacggtatcgtgaagactatcgagtggtatctgaataatcaggactgggtggaagaagtaaccagcggtgattatcagcactattacgagaagatgtacggaaagagatgatgttagtgattaacggttagtgattgctattataacactaagaagaatccccataaacagcatattgcgcgaagtctcgcccagtatgctgtttaattttttaccgcttcgtatctttaccatgcgtttccaggtagttacgtggaaataaaggtaggtgaaaggcatgaagatacctgcatagttccagccttgggcaaaccagaaggaaagcaatgtcgcgatgatgccgagccagaggtaaaggtatctgccgaaaggttctccgaaacggacgatgagcgtacgttttccgctgagggcatcctgatcacggtcgcgataattgttcacaactaataaggtatctattaccagtccgctgatgagcgaagcaatgatgacgtttggggtgaatgtatatgcctgcacatagtatgtgccgcctaccggaacaaagccgaagaatatcagcaccagtaagtcgccccaaccttgataggagaggacggtggtatataggaaggcaaatattacgcagaatactcccagcacaatgagttcccatcctccgtgaggcagttctccccaacttgtgtatagcaatccgagaccggaaatgcaggacaaaatgacgatgacaccgattcccactttcatggctcccggtgtaatccagccttgtgcgcaggcacgttccgggcccaggcggtcggtacggtcggtacctttcaggaagtcgaagaggtcgttgatgaagttggcggcgatctgcataccgcaggcaaagagcatacacagcagagcgggaacaattttgaattgtccgtcggcaaatgccagtgaagtacctatcatcacaggaatgatagctcccgtcaaggttttgggacgggctgcaaggagccatgcatggggggaattctgtttgatctctttcat

SEQ ID NO: 530 - DNA, 7433 bp, unidentified
  source 1..7433: mol_type = unassigned DNA
ctaaccattcacgtactccaatgcaaacctcgtccctttctccaaatcccggttcacgttctttcccaatatatctttcagatatttggggtgcaggccgaagcccggacggacggagcgaacgttccgctccgtaatcacttctccggccttcatatcctcggccacatagagagaacgtgatgcggaacggctacctctcattttctccgtcaattcgtaagtcgttttccccaaagataactcagccatgcgcacatcttttaccatttgggcaaaatctttctcttccatagaaaaagaacaatccggaccaccgatggaacgattcaaaataaagtgcttttctatcatactcgcaccttgagtaaccgccacaatgggagagacactccccagggtatggtcggaaagtccactttttacctggaaacgttctgccaaatcacgaatcatacaaagattggcttcctcaactggagccggataagaagaggtacacttaagaaccgtaatatcattatttcccattctgcggcaagcttcaacagccaattgaatatcttcttcggtggctatgcctgtagcaagtaccatcggcttatgcttcgaagccgcgtattctatcaatggaatatccgtaatttcgaaagaagctatcttataaacgggacagtccaaagcctcaagcatatcgacggctgtcttatcaaaaggagaagaaaaacagatcagtccttcttccttggccacatggaacaactcttcatgccactcccaaggagtataagcctgttcatacaaatcataaaaatattgcccgtcccatatagagccttcattaattataaaatcaggcttgtcacagcgaagcgtaatggtatcagcccgataggtctgcaacttgacggcatcggctccggcacgttttgcagccctgacggtttcaatggctgtttctttcttaccgttatggttggcagacatctcagccacaatcatacacttatctctcatgtctttactatttaatcgtccttagaatactttcaagctcttccatactatcagtctgaagtatgatataccctaaacggtctaaagagttttttatttttttttcagaataaggtcttatttcagaccgaaaaacagccgatgaccgggaagagcttagaaaatccacacaacgctgatagttgagcggattaaggaactgtaccgctgagcatttttcatgtttgcgaaggacatcaacgggcaaaccaagagaacagttcaccagatttctcagcatatctatcccggttgacaatggaaccaaatcagaggttatataatctcctccaagccggcaagcaatttctatgatataagcgcccgattcattcagctttatttctgtatgcgagggacaattattaagtccaatcaggcaaagtgcttttgatacggtctccgaaaccagctcccactcctgtttcgttatacgcgccggttcaatgtgcgtatcttcaacaaagaagccttctgcctcaccgatacaaagtttctccgtaatagtgacaacggtagttttattgttttgcgtatatgtttcaacactgaattcacggcctgttataaagccctcgacaatggcctttccggtacgggaataaccgagagcttcggaaaaagcaagtacaagttctttatgatttgtaaccttttttactccgcggcttgcagaggaatctaccggtttgacaatatatggataatcttgcaatgtgcccaagtccgtatctttatcacaaagcatgaaaaatggtacatcaatcccgttggccgcaaacatttccctctgcaagtatttgtttgtacagatttttgcgacctcagtggacatggacggaagccccagctgttccccgacataggaaaccacatttacaggcgcgtcacttgtagtaagtatgccgtcaacagagtgacgtttggcacattccaaaacaccttccttatccatcgtgctgacaagaaccggttccgaggcgtaccccattcccggagtattcgcatccatatctgcgactatggtatgcaatcccatatcgttcgcctttcggatgacaggaacctgcatttcacctgcgcccagtatcaataatcttttattcatataaccgaatttatcacatcacagatctttcttgcctgtgcttcactgaaccagaaatcattaaacaaattgacgatatgcttcacctccacttccgcaacaggagaagaaacacctttgaacatgtatgaaaccgaagggaaattagtcccggcaaacagaccggccttgaatattgcgtcaagaaccttctgccggttctcgatgacaatcatgaacctccagttctggaaatcatctcccatctgaatcgattcaggaagcagattcctgtatatcttgtttattttctctttttccgcaatcacttttgggagctttctttcaatgatgtcaaaatattcctcatcggtcatttgcaaatttgaggcgtccagccaaggatagtcagccggaagcatatatctgacattctccaggagacatttccttatatataccgaatgcttttgttcactaatgctatcatactaataatcaacaacttcgtaccccccctaaaacttgcatagccaccataggaaagttctatgaatttagcatatccggtactgtaaaggcagagatccacattttcaggcaaggaatctaccaattcgggaatgcacaaacaacaatcatcaatgatacaaagattttgatcgagacttttcactgctcggtaaaattctttgttgtcatactttttcccgtaggcatgcacaaatacaagaccggaatattttcccgcctctatagctgtcaaacatttctcggttgacatggcatggctttcatctatgtctataaattcaaaaccgacacctgctttcataaacgacaggggcactacaggacacacatttgccggcaataagaacggtttatcaaaatggttgccagacagataattatacaatatggccgaagctctttgtgaagttacttgcatatcaacagacttttaaacaaattgacaaaccgtttgggaatatccggagtgatggcatgtcttttacgaatggccatcttatccaaattctcagcaacaagagtaaaggcagcggcatcggtataatcacccaccccctgaatcagcccttcacgcaaaaacatataatagtcgtactcctgattatcaacataataccctcctataacaggagttccacaggccaatgcctcattcatcatcgtagaggcaggcaatatggcgacatctacagtactaaacaagtctgcaatggaaccggcagacaaattcttctgataggttactttggggtcatcaaccatattctcggctgcatacgaatcaccgacaattgccgttatcttcttcacattgtctttggctttaattgcatgaatggtctgatacgtcaaattcaagaaatcagaaccaccaaaagccaccaatacatataaacctcctgaataattgttccgtttattctgcagcgcaacattgaagaaaggcctcctcaacaatgaaaattgaagcccaaaggcaaattgagtatatggttcacacgaatagtcatcacgcgtgtaacccaatccctgattgactataagatcagccacatagtgcttgtcgtgcatatcatccacacacaccagacagcaacctttttgcttgatggcacgctggtaatcagtagtaaagaaatagttgtcaagtaccacaatttcgtcaccttgtaaaagggaaaggaactcatcataatgcgattcttcctgtaaggggatgaaaggacataccttctccatctcactcacctgataaggggtaggatggcaagtaaagaaggtacaatcaaaatcgtccttcagcatatcggccaaagccagagtacgaataaagtgaccgtagccgatggcagcacttgcatcggcacggagatagattttctgcattacatcatttatgaagcaactcatacttcatctctgccaatgcccagtcagtctgtgtatcaaggtcctgcacttcaagttcggaaagtaccaacccggctgtattctcaccccaaaaagtccggctctccacaaagggagcagtgcgagagaaatagaactgaccggcatcgtgataaatcggttctaaatcttgggaacgtgcatttttgtattcgggataaaccatactaatttttccatccacgatgtgaaggctgcgctgtataggataggaataagccacacaagtgaaaacggaatctatctccgaattcatttttccgtatgcttcccggagtctttcgggagtgacaaaaggagccgttgagtaaatgcaacaaaccgtttcaaactccctgccttgctctttatacttcctcagtacttcaagaattacatcatcagtaccggcatagtcatttgacatctcggcactccgcataaaaggaactttggcaccatacttacaagctattccggcaatctcctcatcatcggtagaaaccatcacctcctcaaaaagaccgctttgtaaagctgcctctatggaatatgtaatgataggtttacccataaagggcttgatattcttacgcggaatacgtttactgccgccacgtgcaggaatgattgctatatttttcatttcgctacaaattctataaccttttcaatcacatactcctgttcctcgtccgtcagcgtgggatacatcggaagactcagacaatgttcgtaatactcttctactataggtaaatcgcctttcctattgccccactgctgatagtaaggcatcagatgaagcggagcataatgaacctgcgcatagacattgttctcgtgcagataattataaaggcccaagcggtcagctacttgaatgatataaaggtgataagcatgatagacatcggcagcattgaacggagtcttgatgccatctattccggaaaacgcttcattatagcgtctcacgatttcatggcggcgttcaagacctgctttcgcacgctccagctgagaaatacccaaggcagcctgaaaatcagtcagacggtaattataccctaactcctgcatctcataataccagccaccatgatgctcgtgtaataaagcagggtctttcgtaatgccatgcgtacggtaaagacaaagcctgtcatagagctccttgctgttggtggtcaccatgcctccctcacccgtagcgatatgtttcacgggatggaaagagaatacggcacagtcggcaaaacgaccgttaccacaatgttgtttcttgcctttactgtccatgaaatagccgccgggagcatggcaggcatcctcgataatccacaaaccgtactcgtcggcaagctttctgaactcttccagatccaaaggatagcctgcaaaatcaactggaacaatacctttgtaagtaccgcggggagaagctttaagcatggcttcaagtttacggatatccatgaggtaagtatccttgtcaatatcacagaataccacctcgccgccacaatagcggatgcagttggcactggcagcaaaggtcatgggagtgacaatcaccttgtcacccggctttacattcagtgcggtagctgcaagatgaagccctgaagtggcattgttcaccgctacggcatattgtgcacctacatattcggcaaatttcgtttcaaattccctgattttgggaccttgtgtcaggtaatcgcttttcaaggtatcgatgactgcccggatatcctcatctgtgatatgctgacgaccgtatggaataggcttgcttatcatttcacctcgaaattagggtcaacgtatttctttatattctcgcgcatagtctctactgtctcccactccgtattgttgtcactgctgtagtggaaaccgtcgggaacgggtactgcattgtgatgtctgatgaactcttcgcgactgtgcttgaaagatacagaaggaagaatgacataatatctgcccaaatcgattgtatcaagagcatcggttacagtaatcatctcctcgtgcagcttctctcccggacggatgcccacttccacctgcggcagattgggtgcaatggcggtagccacgtcctggatatgataggaaggaatcttaggaataaagatttcaccacccaggtgatgtccgatggcatacatgaccaaagcgacaccggcttccagcgaaatgttgaaacgggtcatgcgcatatcggttatgggaagttccttcgccccgttgtcacgcttgttgataaagaaagggattacggaaccgcgggaacccatcacattgccataacggactacggagaacctgatgttcttggaaccgctgatattgttggcagcagtaaacagcttgtcggaagtgagcttggtggcgccataaagattgatgggggcacatgccttgtcggtagaaagggccaccacatgctgtacaccggtggcaagagcagcctttatcacattctgcgcaccgtgtacattggttttgatgcactcttcgggattgtattcagcggtatccacctgcttgatggcggctgcatggataatcacgtccactccttcgcaagcccgcgtcaggcgttcgaggtcacggacatcaccgataaagaaacgcagttgcggatacttatgaccgggatatttctgtttcagctcaaattgcttcagctcatcgcgggagtaaataatgattttctttacttgcggataatcacggagaatggtttccacaaacttctttccgaaggaacccgttcctccggtaatcaatacggatttattgttaagcattataatgaaaagttttattcatcgatatattcccacggatagggattgtctgtcacattctgaaactcatcaaccgcttcctgctgttcgggagtaagtgataaggaatcccaagaggcgatgatggaacggccctcgtcggccaaagactcgtcgaacacttcaccgtagcaggcggtaagcagacggagcttcagtaaggaagcgggaagggcatcgagcacatcccaacaacagtccagcactttctggacatgccgctgcttttcgccatggtccacaaaagaggcgctgtaacccataagaagggcaagacagacatttgcctgctcttcgatggtagtgccttttacacccgaccggtacaaagccatggtaagacggtagacctcaccgttccgccgtgacaagtcatcgctatagacgggactgccgtccatacccaaatacatcagttcgtgcgcagcacgctgaagagtgattgcttcttcggaaagagacat

SEQ ID NO: 531 - DNA, 11376 bp, unidentified
  source 1..11376: mol_type = unassigned DNA
atgtcttttttcaatatcgttgcggctaccaatgaagatactgttgttgctacctatgaaccctccaaggtgcgctctgacagctaccagagcgaggcggaacttgaaaaagagtttatccggctgttgtgcgagcagggctatacctatctgccgctgcataccgaggatgaactgattgctaacctccgcagccaactggaagagctgaaccactaccagttttccgatacggagtggcagcagtttttcagtgatgtaattgccaaccccaacgagcatattcccgaaaagacccggaagattcaggaaaacaatgtgcaggtgctgcaccgggatgatggcagttccaaaaatatcacgctgatcgacaagaagaacatccacaacaaccgcctgcaggtcatcaaccagtatgaggtaaaacaagcagacggcgcgcggcatgataaccgctacgatgttacgattctggtcaacggctttccactggttcatgtggaactgaagcggcgcggggtggccatccgggaggcatttaaccaaatcaaccgctaccagcgggattcgttctgggcgggctgcggcttgtatgagtatgtgcagatttttgtgatctccaacggcacaaataccaagtactactccaacagcacccgctacaatgccatcaaggacgccaaacacggcaagacgaaaaaggaaaagaccagcaatagctttgaatttacctcctactgggctgatgcgaacaaccgcgtgctgacggatctgatcgactttacccggacattctttgcaaagcacacgattctgagcgtgctgacccggtattgcatcttcacctcagaaaagatgctgatggtgatgcgcccatatcagatcactgcaaccgagaggatattgaaccgcatcgagatcgccaacaactacaaaaagtatggcactatcgagggcggtggctacatctggcacaccacaggctccggaaagacgctgacctccttcaaaacggcacggctggcatcgcagctgccctacatcgacaaggtgttgtttgtggtagaccgcaaggacttggactaccagaccatgaaggaatatgaccgcttcgagaagggcgcggcaaactccaacaccagcaccacgattctgaaacgccagttggaaaacccggaagcacatatcatcattaccaccatccagaagctggcgaccttcatcaagaagaatccggggcatgaagtctaccagaagcacgttgtgattatctttgacgagtgccaccgcagccagttcggtgatatgcacaaggccattgttcacaatttcaaaaagtaccacctgttcggctttactggaacgccgatttttgcagtcaacgcaggaagctccactgatccacgctatttcaccacggcgcagacgttcggcgaccaactgcacacctacaccatcgtggatgccatcaacgacaagaatgtgctgccgttccgggtggactacatcaagacgatggacacagagccagacatggacgataaacaggtttgggatatcgaccgggaaaaggcgttcatggcacccaagcgtatttctctggtgacaaagtacatcctcgaccacttcgaccagaaaacctatcggggagacaaatcgtatgagtttaatctgctgacgaatgtggcagaggtggcctctgcccagcgtggtgcggtggaggaaatcaagcaaaaacagcgcgtcagcggttttaattcgattttctgcgtggcttctgtgccgatggcaaagctgtattatcaggagttcaaaaagcagatggcagcagacccgaccaagcggctgcgcattgccaccatttacagctatggagccaatgaagcggaaacggatggcattctggacgaggaaaacccggaagatacctccaaccttgaccaaagcagccgggattttctggacgcagccattcaggattacaacgagatgttccatacgaactactccaccgatggcgaacggttccagaattactacaaagatgtatcgctccgcatgaagaacaaggaacttgacctgctgatcgtcgtcaatatgtttctgacgggcttcgatgccaccacgctgaacaccctttgggtggacaaaaacctgaagatgcacggtctgattcaggcgttcagccggacaaaccgtatcctgaacagcatcaagacctttggcaatatcgtctgcttccgcaacctgcaaaagagagtggatgcggcaatttcgctgttcggagataaaaatgcgggcggcatcgttctgctgcgcaaatatgcggactactaccacggttatatggacgagcagggaaaataccatcagggctatacggacatgatcgatgacctgacgcagaagttcccgttgacagagccgcagatcatcggagagcagaaccagaaagactttatcgtactgtttggcgcactgctgcggatgcggaacttgctgtcttcctttgacgatttcaagggcaacgaactgatctctgaacgggatttacaggactatttgggccgctatcaggatttgcgggatgaatggcgtaacaagaagcacgatgaaaccaaagaggatatcacggatgatgtggtgttcgaggtggagctgattcggcaggtcgaaattaacattgactacatcctgatgctggtcaaaaagtaccatgacacccattgcgatgacaaagaggtgctcatcacgattcgcaaggcgattgacgccagcccggaactgcgcagcaaaaagcaactgattgaaacctttattgcaggggtcaacgatgtggatgacgtgatggcagagtggaacagctatgtgtccgaacagcgagagaaagagcttgtccaaatcattcaggaggaaaagctgaaagagccggagacccgcaagtatctggccaatgcgttccgtgatggcgagatcaaaactgtgggcactgacattgataagctgatgcctcctgtttcccgctttggcggcggtggccgtgcgcagaagaagcaaggcgtgatcgataagctgaagagcttctttgataagttctttgggattggcggaagttcgatgacagcgggagataacaaataatgtctaatgtcgagtgttcgtgagcggaaaaactaactttttactctttagttaggaagaatattaccctgaaattaaaacaaagttgcttgtggagggatgtctatgaaattgttcacaagtaaaatgctcgaacgattgatgagcgaacaaaagaaaaagtcggaaggactgctgccagaaattatcaagcggttgatccgaagcagttgcccggattattcgtatcttcgcgcgccagaggaagatgatatttgggcaccgggatatgatggaatcatggataacggaacaaaaacgccttatgtggcacagggaactagcgtgtgggaatttggaaccaatgcggattccttggaaaaaatcaacagcgattatggaaaacgcacaacccgtccgcttggagtgaaaaaatcagatactactttctatctcgtagtgcctaaaatatgggcttacaatatatcacttacagagtgggaggcggaacacagagatgaatggaaagcagtctatgtatatgacgcatctgttttgtgcgattggcttaactcggaaccggcggtttgtgcatggctaatacaaaactatctggaaaatgaagcgatggaaatagattctgttgcgcatgcatgggagcagtttgtacaaaggacaaatcctccgcttaatcaggcaatgttccaaatcggtagggaagagcagctggaagcttttcgcaaaaaggtgaatgaaaagatatgccgtgtggcggcagaatcccgaatcgaagcatatggattctgcttggctgcgctgatgcaagattcggcattggccgaacaggtgactgttgtttgcagcgaaacgacgtatcataatttggacagcttatgcgaaaacgcatatttcctgttgaggtttccgtataacgggcgggtatcaggacgtaaccaaactattctctgcgagggaaagggtgctgcaaaaaagaatgtaattcgattgcttccgcaatggaaaacgcagtatcttcaggcgttgcaggagatgggcatcgatagcgcaaatgctgatgaactttatagttatacacacggaaatcttccagcactcatccgaaaaattccgggaaatgaagccgatttacagccggaatggatgagtgcggcagatattgatttgttgcaaccgcttgtacttctgcgacactacaatattttagacgagaaagagaaacagctggttgcacgattggctgaaacaccatatcctgtagtggaacgaaaatatgaggaactattgcggatagatgacagcccaatcaaaaaagttggagcgtggtatcaaatcgtcaatgatgaagaagcgtggctggcattgaacatagacatagaaagtgccatggggcaacggatgcaccaggaaatctgtgcggcactctcctgcacagatgcagcacaaaatcatagaaggtatggcattcttcaacggttgcttaaaaattacatttgttttgcggagactgggtcagatcaaaatatgattgatgctcaggtgagggaagtcctttccttttttcataaagataattgtaaagagtgcatcataaaggaacttcgaatccttgctgaagcagctccggaagctgtgcttgaatttttaaagaaagaagaacagctggggggacaaaatgaaatcctctggacgctagatactttaatagaacgagagaatacatgtctttcagcttgccaaatactgtatcggctagcattgcaaggagaacagaatgataaagaggcaaaacagcatctgttagatgcactttgcctatggagttctcatacggcgctgactcttgaagagaaaaaggttctgacgattcagataattcagcaaaatccagatttcggagtgaaattcggcattgaactgctccgtaaaacctcactgattcgaggacatcgccgaggaaagaaggaacgacccgctcaattaatcctagaacaagaattgtttgaagcttacgatgaaatcacacgagttgtttatcgtacagcactacagaagaaatggcttgggcaaatagaaaacctgttgaaagagtatcgtcggctgggacaggatgttctactggagatggcagagcagtttgatgcaacacaattctcatcaacagcattacaaccaatgcaatattggttaagaactgaactttgtggtagtaaagaatatggttggacagattggatagaagttctgaaaacatggatacgctgcacggaatccagtgatcctgtgggaaaatttggatggatatttctggaatggaactgcctgcctatggaagagcttttagacaatcaagaagaaaagagctggacgaaggaggaagaggaaagagaacgcattcgagcggagaaatttgcagcactgaaaatagaatttgggatggacgcagtgtggcggctgctggaaacaatgagggaccagcacgcatggggcgtatttcttgctaaaaacactacatgtgaagaattttcggatgtagctgaagcaattcgaaaacaagaaaaacaacaattgttggctggctttttcgatcaggggaattttcaagaagcatcttctgtctttgaaaaaatgtcagaaaatgaaaaacttcggctgttgtctacgttgcggcgtgaagaaattgacccatggctgacaacgcgggagagagaacagacgtattgggcgaatcaggacatgaggtggtcctacaacgaacggagatacaagaagctattgcagtaccatccgggagggctcttactttacctgtatggcaatagtggacaggttgagcacttgtttgatctattcaggaaagtatttgaggcaattgctgaacagggagtcaatgcggaggaaaggggatacctttctggtattgtccgcagagtggacgagcaatattatactgatgaatgggctaagtgttgtctgctactctataaaaaggagttgctgcagaaacctcctctgtgtttgcagcggctcttctttaggcatccggataagatgaaaatgtttttggaagagaatccttcaagatcgtttgatgtagaaaacgactattatctgcccgaggaggcgtatcaggacaagcgtgcatttgactgctgggctgaatgtttgtatgaggagtttccagagattttaggctatattatgggaaaaagctgtaatggaaaagacggtgcttttccgcatgaatttatccgagagtttctggaaaaacaacagaatgagaaattgacgaaagcggtattctatggaaagtttaattcccgtggtgcacggattgtacaggatggccgaaccctttatgaacaagcaaaatgttaccgagcgcaggcgcgggaactgagattgaagtttccacagagtgcaaagattctcctgcagctagctaaatggatggaatcagaagctcagcatgatcagctagaagcagagattgtaccttaaggaaataataagaatctccctgctgaaaagcagttgcatcttaaacgtgaatacgttataatactcacagagatcccgctggttgtgtgatactatcctgatactaaaaaatcagcaagccatatctagcacagcaatctcatgaaaaagtgaacattcaagaatagcgttactaagcaaatttgtttagtaagaatccaaacttaccgagctcgagtaatcccttatagcaccaacaccccagaaggtccttcaaaaacgaaaccttccggggtgtttttatcttccagcacgatcaaacaagccgtaacattcaaagtggttcctatatcagcgcaaactctaagcattttgaccgtagcattttacacaaaaaaagcccgaaaccccttccttctccgcccacaggggagtataatagaatctgttgtttgcaaaataggaaaggggaagtatcaactatggaatcgaagcagaggcttttggagccgcagctcgtccaaacaggaagggcagatcagttcagccgcaaggtgttctgtgacggaatgcgggacggtgtgcccattgcactgggctattttgcggtatcgttttcgttgggcatcgcggcgcgcaaggcgggttttacgccgtttcaggggtttcttgtcagcctgctgaacaatgcctccgcaggagaatatgccgcatttgcgttgatcatggcaaacgccacctattttgaggtggcggtcattactttaatcgccaatgcgcggtatctgctgatgagctgtgcactggcacagcgctttgctccggaaacgcccttctggcatcggctgctcatcggctatgatgtcacggacgaactgttcggcattactatcgcccgcccgggcaacctgaacccgtactatacctatggcgctatcctgctggcagcgccggcttgggcttgtggtacggcgctgggcattatagcgggcaacctgctgccgctgcgggtagtcagcgccctgagcgtggcactttacggaatgtttctggccatcatcatcccgccggcccgcaaggatcggatcgttgcggtgctggtcgtcatcagctttgcgctgagttttctgtgcagctatctgccgggcatctcggcactctccgaaggcacccgcaccatccttttgacagtggcgatctccggtgcagcagcggtgctgttcccggtcaggcaggaggaaaacgaagatgacgcataacaattatatctatattgcggtcatggcgctggtgtcctatgccatccgcatcctgccgctgacgctgatccgcaaaccgatcaaaaaccgcttcatccagtcgtttttgtactatgtgccctatgtaacgctggctgtgatgacctttccggccatcattcaggcaacgcagagcccggcagcaggtgctgttgcactggtagtcggcattgctgccgcatggtttggcgcaagcctgtttcaggtggctgcaggctgctgtgccgtggtgttcgtgctggaattttttatctgatgccttattgcgggagaacaaaatgaagaagatccttgtaaccggtgcaggcggctttgtaggttcccgcgtgatgcagcaatgggcggggcattacgaactgtgcacctttcctaaaggctttctggcaacagcaggggaggacgccgtgcggcaggctgttttgcagcagcgcccggatgtcattctgcacactgcagccatttcggataccggctactgcgccggccacccggagcaggcttaccgcgccaatgtggaactgtcggtctggcttgcccgggcggcagctgagatcggcgcaaagctggtggctttcagctcggatcaggtctatgccggtgtggagcagtccggcccgctgccggaaacaattccgttaaagcctgccaatgtgtacgggcagggcaagctggaaatggagcagcgggtgcaggcactctgcccgggtgccgtattgctgcgcgccacatggatgtacgacctgccgggctaccggctgcccatccggggcaacctgccgctgaaccttctgcgtgcggcgcagcggggagaatctgtccgcttttctgtctgggacttccggggcatcacctatgtccggcaggcggtagcactgctggaagctgccctgaccctgcccggcggggtctataactttggcagtgaaaacgctgaaaacatggtactgaccgcccggcagtttgctgagacactggggatcacggtcgatattcaggaagctgactgggcacggaatcttgcgatggattgcagcaagctgcgggcgcagggcatcgtatttgacaccacacaggcagggctgacgcgctgtttgcgggattatggactgctctgactgcagaaacaaaaatttttccgtatcgcacaaaaaacagagaaaagcacgaaaaaagcaggggattctgtatgatgccaggcgaatcaggctggacaaatcatgcggaagccctgcttttttgcttgtctgccgaagaaaagttcgcttaaaggatgcagcatttttcatataaaaagtcatacttattttacatcttatctgcattttgctataatattttcgcttttttgcaaagcatccgaaccgcataaacctttaaaaccttgaggagagtggaatttttgaaggaagtcaagcttgaagaagcggcttatcagtttgaagccaaaatgtccctgcggcaggccatcccgctgggcttgcagcatgtctgcgccatgttcgtgggcaacctgaccccgctgctgatcattaccagcgcctgcggcattgcaggcggcgagtttgcagacctgcaggtcaccctgctgcagagcgccatgttcgtggcaggcatcgttacgctggtgcagttgttcaccatcggacccgtgggcggcgcagtgcctatcatcatgggtaccagttccggctttatcggcgtgttcaacagcgttgtgggcacgatgggcggcggtgtgctggcctatggcgcgatcatgggcgcatccatcatcggcggtatttttgaaagcgtgctgggcttcttcctgaagccgctgcgcaggttcttcccgccggtggtcaccggcacggtggtgctttccatcggtctttcgctgatctcggtgggcatcaactccttcggcggcggcaacaaggccaaggacttcggctctgtggagaacctgcttctggcactgttcgtgctggtggtcatcctgttcttcaaacactggaccaccggcttccttagctcctctgccatcctcatcggcattctggccggttatgtggttgctttcattatgggtctggtgctgcccaccaccggcgtgactgctgatggtgtagagttcaccaaggcatgggtgctcaactggaacaaggtggcacaggcctcctggttcgcagtacccaagctgatgccggtcaaggtggtattcgatgcccgtgcgatcctgccggtgctgatcatgttcatcgttaccgcagtggagactgtgggcgatatctccggcgtgatggagggcggcatgaaccgtgagccctccgataaggagctgtccggcggcgtcatctgcgatggcctcggctctacctttgccgcactgttcggcgtgctgcccaatacctccttcagccagaacgtgggtctggtggccatgaccaaggtggttaaccgtatggcactggcctccggtgctgtgttcctgatcctctgcggcctgattcccaagctgggcgcgctgatttccatcatgccgcaggccgttctgggcggtgctgccgttatgatgttctcttccatcgtggtcagcggcatccagctgatcaccaaggaaaagatgactccgcgccacctgaccatcgtgtctgtggcactgggcgtgggctatggcatgggtgccaacagcggcattctggcacaggctccgcaggccctccagctgatctgcggcgagtccggcattgttccggccgcctttgtggcaattctgctgaatgtgctgctgcccaagaacgatatggcagaataaattttaacttttttgccgggcaagggcttccagctgatgcaacacctccggggtgtctgcgtccagcagctctgcgctgtccgcaatgcagaccgtgcgcacctgcgcaggatactttttaagcagcacgttgccgcctttattttccggtagggcgagcagttccggaaagaaactgcttccaaacagaacgggacttccaacaagaggcgccgggtcgttttcggccacggcacccagacggaagatctcccgttctgtttctttttgccattctgccggggagggctgctcacggcagaaaagagcggtcatagcttctaccgtctcccggcgcagcaggggctgatccccgggcagaaacatacagccgctaagctccggcagctgctccagcagcgctgaaagccccagccaaacggtatcgttgcggccaggcaggctgtgcagcaacaccgggacgccatgcgccctgcacaacgcctgcacctcttccgagcgggtcaccacgatacgggcggagataccgggtgtagcggtagcggcaaaggcccggcagagcatgggctgcccgcaaaaatctgccagcagcttgtttgcaccaaaccggcggctcagcccggaagccatgatcacacagccgaccgtaagcgacttcttcat

SEQ ID NO: 532 - DNA, 7900 bp, unidentified
  source 1..7900: mol_type = unassigned DNA
tcacgcccgggcggtcacgtatttggcaatcttgcgggctgctgtggcctgggagatgcccagctcccgggccacggccactgtggtgccgcaccgctggtaggaatcccggatgatttgggcctcgtaggcgtccatccgctccgctagcgtgccgccgggaagcagctccgcaggggccgacgcgtcggcggtgtactccagcggcagggcaggaatgtccagaatggggtcctgggcagtgattaccagcctctccatcaggttctccagctggcgcacgttgccgggccaatcgtactgctccagaaaagccagaaagcgggggctgcaggtgagggacttgttgtactccccgcagaagcgggccaggaactggtgggccatggggacgatgtcctccttccgctgccgcaggggggggatgtggatgcggatgacgttcagccggtagaagagatcggaccggaacagaccgcgctgcaccgcctcctccagattgcggttggtggcaacgatcagccggaagtccagctcgatcttctgggtgccggagaggcgctcaatggtcttctcctgaatcagctgcaggagcttggactggatatgggcgggcagctcgccgatctcatccaggaacagcgtgccgtggttggccagctcgatcttgccgatcttgccggaggaggaggccccggtgaaggcgcccttctcatagccgaacagctctgactcaatgagattttcatggagcaccgcgcagtttacctcgataaagggcccgtttgcacggttgctcatcttgtgaatggccttggcgatggcgcttttacccacgccggtctctccggtgatgagaatgttggcccgggtgttggcagtgttctgcatcagcgtccacagccgctgcatgggggcgcttttgaacagcagattggtggaggtggcccgggtccgcagctcggcaatctcctgggagtagtgctgcagggagtcctgcatccggcggtagttccgttggatggagttgatctgctccatggacacggtgttgaagcagacggcgtatttcagctccccgttggcgtcaaacaggggaatgcccacggtcatcacgtttttgtgggtgtggttgatggtctgtgtggcgctgatcttcttccgccgccggatgacctccgccgtaatgcagggggtgaaggtgccgtccgcctccagatcaaaggcggacttgccaacgatggagtcatgggcaaaaccgaagtttttctcataggtctcgctgacccgcagaatgatgccgttgccgtccgagaccatcatgtcgtccgccaggaccaagttgttttccgggctgaggatctccagaagtccctccagattgatcccctcgtcgtggaaagcagaaaaagacggaatcgccataggcgcagacctcctgtgccggactgaatgccggttgctctattcaaaaatgagtatagcatattcaaaaatgaataggaagaggcgggaaatatttttggctcgtgaaatttcacgaaaattcgacagacagactgctgtatttcacaaacaaactgcggaaaatgctggaagacactgacaaatttgttattcaaaaatgaataatcccgcatggaaacggctgacggcaccgggaaaagcaagcgatttaccacttggattttagcaacctacacaaaaaaacgaaccgaaaatgagagaattacacctggaaaaatggcatgatttttgctataactaaattgttggatgattactctccaacagtttgctgagcaaaatatgattaaggaggacattccaatatgtatcagaccattcgctatgaaaagaacggcaatatcgggatcgccaccatcaaccgccccgaggcgctgaatgcgctgaactccaccgtgatctctgagctggaacagctcatcagcgaggtggagaaggatgccgagctgggcgccttcatcatcaccggcgagggccgctccttcgtggccggcgccgacatcggcgagcagagcaccatggacgtggccgccggccgcaagtggggccagcggggcagcgccctgttccgccggatcgagaagctggagatccccaccatcgccgcagtgaacggcttcgctctgggcggcggctgtgagctggccatgtcctgcgacatcattctggccgccggccccaacgctgagggcaagggcggcgccaagttcggccagcccgaggtgggcctgggcatcacccccggcttctccggcacccagcgtctgccccgccgtgtgggcgtggccaaggccaaggagttgatcttctccggcaagcagatcggtgctgaggaggccaagcgcatcggcctggtgaatgaggtctatgccgccgaggagctgctgaacaaggctgtggagatggccaagtccttcaccgccaacgcccccatcgctgtgaagtattccaaggcctgcatcgaccgcgggatgcagatggacatcgacaacggcatcgccctggagaacgagctgttcgccatgtgctttgccaccgaggaccagaaggagggcatgggcgccttcctggagaagcgcaaggagaagcacttccagaacaagtgagcgcagaccggcaagaggccgtccatttcattacatataaagagggaagtcaggcatgaaaaaagttcgcgtgcttaccgccgaggaggcggcgctgctggtgaacgacggcgataccatcgccaccggcggctttgtcagctgcgcctgccctgaggcgctgtccaaggcattggagaagcggttcctggagacgggccatcccagagatctgacgctgttcttcgcggcaggccagggccaccgggacggcaccggcggcgaccactacggccacgagggcatggtcaagcgggtcatcggcggccactgggaccgggcccccaagctgggcgatctggccctgagcaacaagatcgaggcgtataacctgccccagggcgtcatctcccacatgtaccgggacatcgcggcccacaacatcggcaccatcacccacgtgggcctgtacacctttgccgacccccgcaacggcggcggcaaactcaacgatgtcaccaaggaggacctggtgaaggtcgtcgagatcgagggccaggagcggttgctctacaaggcgttccccatcaatgtggtgttcctgcgtgccagctatgccgacgagtacggcaactgcaccgttcaccgggagatcggccccatcgacgtcaccgccatggctcaggcctgcaagaactccggcggccgggtcatcgtccaggtggaaaaaatcgtccaaggcggcagcctggatccgaaactggtggcaattcccggtatctatgtggattctattgtggtaggatccattgaggataacgagcagtgcctgggaatgccctatgacggcagcctgaccggcgagttccgcattcccgtggacgccatcccacccatcccgctggacgccaagaagatcatcgcccgccgggccgccatggagctgccccaggatgccattgtgaacctgggcaccggcgcgccggaaaaaattgccaacgtggcggcggaggagggcatctccgacaagatgaccctgaccgtggaggccggctccatcgccggcgtgcccatgggcggcacccagttcggcgccgcagccaactccatggccatcatcccccacaacgtccagtttgacttctaccagggcggcggcctggatgtggccttcctgggcctggcggagacggcacccaacggcgacctgaacgtgtccaagttcggcacccgtctggctggcgccggcggcttcatcgacattacgcagaatgccaagaaggtggtctattgcggcaccttcaccgccaagggcctgaagactgcctgcgaggacggcaagctggtgatcgtccaggagggcgccaagaagaagttcgtcaaccaggtggagcacatcaccttctccggcaagtatgccgtgcaggtgaagcagcctgttctgtacatcaccgagcgggctgtgttcgagctgcggcccgagggcgtgactctgatcgagatcgcgccgggcatcgacctccagacccaggtgctggatcagatggagttcatgccgaagatcgctgaggacctgaagcttatggacgagcgcatcttcaaagatgagctgatgggactggcggaggcctgagaatttccaccgtcgcagcaatgcgatttccagccctgaccgggccgcaaatcgcgccgctgcctcgaaaccggcgaagcgccgccagcggcggatcaagcgagccgggttccccctctccctcacacggcgagggagccgcgcccagtggcgcgggccatggagttccgggcaggcgaagctcacctggaacacattgaaatgtaaaagacccccatttttttgaggaggaaaaaaagaaatggcattgatgaccgcacaggagtatgtagagagcctgcgcaaactgaatacccgggtgtatatgttcggggagaagattgagaactgggtggaccaccccatgatccgcccgtccatcaactgcgtggccatgacctacgctctggcccaggacccccagtatgccgacctgatgacggtgaagtccagcctgacaggccacaccatcaaccgcttcacccacctgcaccagtccacggaggacctcatcaacaaggtgaagatgcagcgcctgctgggccagaagaccgcttcctgcttccagcggtgtgtgggtatggatgcgttcaacgccgtgttctccaccacctatgagatcgacgagaagtacggcacccgctatcacgaaaacttcaagaagttcctgaccttcgtccaggacaacgacctgacggtggacggcgccatgaccgaccccaagggcgaccggtccaaggcccccagccagcaggcggacccggacatgtacgtgcatgtggtggagcgccgcgctgacggcatcgtggtctgcggcgccaagtgccaccagaccggctccatcaacagccactggcacatcttcatgcccaccatctccatgggcgaggcggacaaggactgggcggtgagcttcgcctgcccgacagacgccgagggcatgtacatgatctacggccgtcagagctgcgatacccggaagctggaggaggacgcgtccatcgacgtgggcaacgcgaagttcggcggccaggaggccctggtggtgctggaccacgtgttcatccccaacgagtacatcttcctcaacggcgagtatgagttcgccggcatgatggtggagcggttcgcgggctaccaccggcagagctacggcggctgcaaggtgggcgtgggcgacacgctgatcggtgctgcggcgctggcagcggagtacaacggcgtggagaaggccagcgcggtgaaggacaagctgatcgagatgatccacctgaacgagacgctgtactgctgcggcatcgcatgctcctctcagggcttccggacgaaggcgggcaactatcagatcgacctgctgctggccaacgtgtgcaagcagaatgtgactcggttcccctatgagatcgtccgcctggcggaggacatcgcgggcggcctggtggtgacgatgccgtcccagaaggacttccactccgacacggtggtgggccggaacggcgagaccatcggggagatctgcaacaagttcttcgccacccgggagggtgtgagcacagaggaccgtcagcggatcctgcggttcatcgagaacctgtgcctgggcgcggccgccgttggctaccggacagagtccatgcacggcgcgggctctccccaggcccagcgcatcatgatcgcccgccagggcaacctccaggccaagaagcagatggccaaggagatcgccggcattcagaactaaggccccacccttgcggcattgcgatccccggcccctgacgggccgccgagtgcgccgctgcctcgaaaccggctcgcttgctctgccgctggcagcgcatcgccggtttcccccctcacgttcgcacagcgaacatgtcgatccggcgggcagaggtgttttgcccgaagtgaattcgtgcaaaacagaatttcataagcaaacctgccggaatatttcatacatcgttgcgttttccaaatttgaatataaggagaagacatcatggatttcaatctcagccgtgagcaccagctggtccggaagatgatggcggaattcaccgagaatgaagtgaagcccatcgctgccgagaccgacaagaccagccagtatccccgggagaacatcgagaagctgttcaacctgggcgtgatgggcatgtgcgtccccaaggagtatggcggcgctggcgctgaccccctggccagtgccatctgcatcgaggagctgtccaagcagtgcgcctccaccggcgacatcgtggccacccacaacggcctgtgctgcgatcccatcatcacccacggcaccgaggcccagaaggccaagtacctgcccatgctgaccaagggccacaaggtcggcgccttctgcctgaccgaatccgacgccggttccgacgccgccaagggccagaccgaggccaagctggacggcgaccactatgtcctcaacggctccaagatcttcatcaccaacggctacgtggccgacgtgttcgtggtcttcgccatgaccgacaagtccaagggcacccgcggcatctccgccttcatcgtggagagcagcttccccggcttctccgtgggcaagcacgaggagaagatgggcctgcacggctcccccaccgccgagatcgtgttcaccgactgcatcgttcccaaggagaacctgctgggccaggagggcaagggcttcaagatcgccatgcagaccctggacggcggccgcatcggcatcgcggcccaggctctgggcattgccgagggcgccatggaagaggccatggcctacaccaagggccgtgtccagttcggcaagcccatcagcaagttccagaacacccagttcaccttcgccgacatggcgatgcgctccgaggcgggccgcctgctgacctatcaggccgccgtgctgaagggcgagggcaagcgcttcaccaaggaggcggccatggccaagctgttctgctctgagcacgccatgctgaccaccaccaaggcgctgcagatgttcggcggctacggctacaccaaggactatcccctggagcgcatgatgcgcgacgccaagatcaccgagatctatgagggcaccagcgaaatccagcgtgtggtcatctccggcaatatcggcctgtaagaggaggaagaacgaattatgaagatcattgtttgcgtcaagcaggtccccgatacctccggcaaggtggcggtgaacccggatggcaccctgaaccgtgcctccatgcagaccatcaccaaccccgatgacatgaacgccgtggaggctgccctgaagctgaaggacgccaccggctgcaaggtcgtggtcgtcaccatgggtccgcccccggcagccggcatgctgcgggagctgatggccatgggcgctgacgagggtgtcctggtatccgcccgcgagttcggcggctccgatacatacgccacctcccagatcctggccgccgccatctccaccatcggtgtggaggaggacgacatcgtcatgtgcggccggcaggccatcgacggcgacaccgcccaggtgggcccccagatcgctgagaagctgcacctgccccaggtgacctacgccgccgacatcaccaaggacggcaacaccatcaccgtcaagcggatgctggaggacggctacatgaccatcaaggtc

SEQ ID NO: 533 - DNA, 5442 bp, unidentified
  source 1..5442: mol_type = unassigned DNA
tcatttcaaaacaaccgtaaagcagctgccgctgccggggcggctgtccacagtgacagcgccgccgtgcagggcggctattttttgtgccatggcaaggcccaagccgttgccctgcgtccggtggctggtgtccccctgatagaactgctcaaagatatggcggcaggtttcggcgtccataccgcagccctggtcagtgacagccacaaccgggctgccctgctcgctgtgcagtgttacgcttatgattccgctcttcgggctgaacttggcggcgttgtccagcagattcagccagatctcctttaccagcgtctcgctgccgtggtaggtgcagggggccagctcggcctcaaactgcagcggcttatcgcgccacttttgccgggtcacaaggatgcactggcgcagctgctcatccagcgaaaagtctgtgcagtcggtcagaatggtctgtgcctcgatacgattcaatagcagcacactgccggaaagctgcgccagccgcctgctctcatcgcggatgatttgcagatactcgcgctgctcctccggggtgacatcctcgtccagcagcaggtcggcaaagccgctgatgctgacgatgggcgtcttgaactcatgggaaaagttattcacaaaatccttgcgcagcagctccgtgccggaaagctcctccgccgctttgttgaaggctgctttaaactcccggatctcggtaggctcatacccgtgggcagcaggctgcagacgcacggtgaagtcccctgccgccagccggttcatcgcctgtatgatgtttttgataggctttattaatacaaggcgaatcgcaaccacaaggctgacggccatcaaaatacaactggcatacaaaataaccagcgcaccgccgatgctgacgctgccgtcttggataaaaaagccgtggtcagcctccaatacaaccagcaccgtgacagcggtcagattcagtgtaacaatgaaaaagaggttcagcaccagcagcatcgtcaaatttacggtgcgtatgcagtcgcgcagcttgtttacaaattgcgccatattacaccttctttatagcacggtagccaatgccgcgaatggtctgtatctcaaactccggccaatcgtaaaagcgggtgcgcagccgattgatatgaacatttaccgttttgtcgtcactttcgctgtccatgccccagatctcatccagcagctccagccgggtaaaggtcctttccggataagccagcagcttgtataggaggttgaactccttgggcggcagcacctgtgcatcgtggccgcgccgcacggtatgggtgtcgtagtccatctcgacatcccctatcgtgattttgtgttcatccacgatgcgggcgcggcgcagaagcgccttgatgcgcagcacaagctcctgccggtccggcggttttgtcatataatcatcagtgccaacgataaaacccatgtgcttgtcctgcggcatatccttggccgtcagcattaaaataggcagcatgctgccgctttcccggatggtcctggtcagggtaaagccatccatccggggcatcatcacatcgcagagcagcagatctatatggttgtggtcgagcatttccagtgcctgcacaccgtcggcagcaatcagcggctcatagcccgctcgctttacgatggcgcaaagcagacgcgccgtgctggggtcatcctcggcaatcaaaatacgaaacatccgtgtatcctccttagttctattatagtacagcgcaaagataaacgaaagataaacattcccgtttaccaaaggtttattttggcggtgtatccttaggagcatcgaaacaaaaaacaccctacgggaaaacggaggatacagctatgaaaaccatctatcttgtcaccggtgctgccggatttatgggcactaatgtctgcgcacagcttttggagcgcggtgatgctgtgcgtgcttttgtgctgaagggcgaccccgctgtaaaattcatgccgaaggccgtcgaaatttttgagggtgacctctgcagtgccgaggactgcgagaaattctttgccgtggagccgggcgtccagactgtctgcatccactgcgcgagcatggtgacgatcaacccgaattacagtgaaaaactcatcgccgtcaatgtgggcggcaccgaaaatatgctgaatgccgccaaaaatcacccggagtgcaaaaagttcgtctatgtttccagcaccggcgccatccccgagctgcctaagggcgagagcatccatgaggtatacagctttgttccctacgatgatgatcgcgtggtcggctggtacagccgcagcaaggcaatggcgacccagaaggtgctggacgccgccgctgacgggctgaatgcctgcgtggtgcatcccagcggtattcttggccccaacgaccccgccatcgggcagacgacccgcacgctgatccagattttgaacggtgagatgcccatcggtatgcagggctcgttcaatcttgtcgatgtgcgcgacctggccgccggtacgattgccgccgctgaccgcgggcgcaagggcgagtgctacatcctttccaatgacgaggtttcgctgaaggaactctgcgaaatgctgaaggcagaaaccggctgccgcggctgcctgttttacatgccgctttcttttgcgcattttgccgccaagcagatggaggcccgcgccgccaagaccggtaagcctgctgtactgactgagtttgccgtttacaatctggagcgcaacaaccattttgactgctccaaggcaaaaaatgagcttggctttgccccgcgtccctacaaagaaacactgcatgatttggcggtttggctcaagcaggagggaaaaatcgcatgaagaaggtttgtgttatcacaggcggcggcagcggcatggggcttgccacggcgaagctcgtctgtgaagaaggatattacacgattttggtggggcgcacggcgtccaagctggaaaaggcagtcaacgatctgcgcagtgcaggcggcgaggccgaggcgttcagctgtgatgtttccgaccgtgaaagctgttttgcgctggccaaatacgccgccgaatgcggcgaagtaaaagcggtattgcacatcgcgggcctcagccctcacatgggcgatgttgaaaagattttgcgcggcaatgcgctgggcacggtgaatatcaacgatgccttttatgaggtcatggcaccgggcggctgtgtgatcgacacctccagcatgagcgcctaccttgccccgcagtttatcatgcccaagggtgcgtacaagctggcgcgcaccgaccgtgaaaaattcatcaaaaagctggtggcgcgggcaggcatcgcccctaaggacgctcgcccgggtctggcctacgccatcagcaagcattttgtaatttggtttgctaagaccgatgccgcacgctttggcgagaaaaatgtgcgttgcctgagtgtgacacccggcaactttgacacgccgatgggcgcactggaaagcaggcaggcggatgtattcaaaaaatactctgctctcaagcgcaacggaaagccggaagaaatcgccgctttgtttgcgcttcttctggatgagcggctgggcttcctgaccggagcagacattcttatggacggcggcgttgtggcaagcggcgccagcggattgagcaaataaaaagggcagcaaagtaaaccccgattttagcttttggggtctgctttgctgccttttgaattttgtgctttcgcttggctgtactttagtgcagctcgctttcgcagcggtccagcacggcggcgataacctgatccatgtcgtaatacttatactcacccaggcgtccgccgaagatgaccttcgactcggcgtcggccagcttcttgtactcggcatacagtgcgccgtttttagcatcgttgacggggtaatacggctcgtcaccgggcttccactcggaggaatactcacggctgatgatcgttttgggcaggtcgttgccgttctcgtccttgccgaactcgaaccatttgtgctcgatgatgcgggtccacggcgtctcgcggtccgtatagttgacggcggcgttgccctggaagctgggcttgtcgagcagctcgttctcaaaccggacggagcggtactccaacgtgccgagtttgtagtcaaaataagcgtcaatcgggccggtgtagacgattttgtcagccagtgcgtccagcgcgaccttgttttcgaggtaatcggtgttcagccgcacctcgatgccgtccagaagattggcgatcaccttggtgtagccgccgatgggaatgccctgatacagcgcgttgaaatagttgttgtcaaaggtcagccgcacaggcaggcgcttgatgataaatgccggcaggtccttgcaatcgcggccccactgcttttcggtgtagcccttgatgagcttttcataaatgtcgcggcccacaagggagatggcctgttcctcaaggttctgcggctcgtgggtgatctcacggcgctgctcctcaattttggcggctgcctcctccggtgtgacgacgccccacattttattaaaggtatacatgttgaagggcagcgaatacagctcacccttatagttggcaacgggagagtttgtaaagcggttgaactcggcaaaccgggtgatatagttccagacctttttgttgttggtgtggaagatgtgcgcaccatacttatggacgttgataccctcgatgttctcggtataaatgttgcccgcaatgttggtgcgcttatccacgaccagcacggatttgccgtggaccttggcctcatgggcgaagatggcaccgtacagaccggagccgactaccagataatcatatttcatataacaggtgttcctctctttaaaagtcaaagggatattgtgcggtaatggcatggagagccttactccactgtcaaaaagcggaagaaaggcgtttcagtctctgccgaatagatctcttgtgtagaccttgtcctgcacatcgttgaggcaggcatcgtagcggttggccagaatggcctgactctgccgcttgaatttgtccagatcgttgaccactgccgaaccgaagaaggtcttgccgtcctccagcgtaggctcatagatgatgacctgtgcgcccttggccttgatgcgcttcatgacaccctgaatcgagctttggcggaagttgtcgctgttgctcttcattgtcaggcggtagacgccgatcgtgacgggcctttcgcggctttcgtcaaactcattttcctgatcgtagccgtagtacccggccagcttcagcacgcggtcagcgatgaagtccttgcgggtgcggttggactccacaatggcctcgatgagattttccgg

SEQ ID NO: 534 - DNA, 17812 bp, unidentified
  source 1..17812: mol_type = unassigned DNA
ttgactaagaatgcattggatatgattgatgagaaaatagtagagctgctgcaggaaaatgcacgtatagcgataaaggagatagcggcacaggtgtttttgtcatcaccggctgtaacagccagaatagagagattggagagcaagggaatcataaagggctatcatgccactgttgattcggttaatctgggctataagataaaggcttttgtcaatctggacctggagcctgtacaaaaggaagagttttatccgtttattgagagtgtggagaatgtcatagagtgcaattgtgtgacaggagagtattctatgctcatagaggtggagtttttgaatacggaggagcttgatgactttatcaacactctgcagaaattcggcaagacaagtacacagatagttttttccactcctgttgagcacagaggcctgcctgtacattcaggttttgatgcataagatgatatgagagtcaaaagatattttgcatgattgaatgaagtgtgctaaaatagtttgcaaaaatactgactgttaaacatgattttggatgctttgaatagtcagatatattgattacggcaggaggataatatgagtaagaaattaggcttcataggttgtggaaacatgggaaaggcaatgatacacggagtgcttgcatcaggcaaggcacaggcaagcgatattcttgcatctgcaaagaccgaaagctccagagaaaagaatgctgcagagcttggaatcaggctgacagcggacaataagagcgtagcagagtttgcagatattctgtttttagcggtaaagccacagtactatgaggaggttatagcagagataaaggacactgttagtgacgatgaaatcattgtttcgattgcaccgggcaagtcactttcgtggtttgacgagatgtttggaaagagcttaaaggttatacgtaccatgccaaacacacctgccatggttggtgagggcatgatgggagtctgtgcaaatgaaagagtatcgcaggaggagcttgatacagtgcttgatttgtgctcgggcttttcaaaggctgagatgatagacgagaagctcatggatgttgtgacagctgtcagcggaagctcaccggcatatgtgtttatgtttatcgaggccatggcagatgcggctgtagcaggcggcatgccaaggagccaggcatatacatttgcagcccaggcagtgcttggaagcgcaaaaatggttctcgagacaggaaagcatccgggcgagctcaaggatatggtgtgctcacctgccggaaccactatccaggctgtgcgtgtgcttgaggaaaagggcatgagaagcagtgtttttgaagctatgatgaaatgccttgatatctcccgcaaaatgtagtagaattattgcattgagttaaaggagaaaagcaatgagtcaggcaaaggttgataaatataagaatgaaaaggcaaatcgtaaaaagacaaatgccagaaataaagtaaagcgtgttatagcacgaattgttgcagctgcggctgtagtcgcattggtaggctggggcggttactccggatatcagtactatgagaagagtcgtccggtgaactgctattacgcggatatcagtgctgtcagcgattatctacagggattgtctgcagacagtgagcagtagattatatttttgatacataacatatattttacgatttatatgattaagttaaaatgcctcgcaggttactgcgaggtattttcagtttttgaagaatccccgggctctttttgggattcagatacagtctttgcattttcttcggtatttgaggtgtcagatttttttgctttggagagtgtgttatcaattgcgttgagcagcactttggaggtgtactgacttgtgtttgcgtaggaaatattatcggtggattgattttgcacaatctgcgatacgagctcgttcatcgcaggctcaacaagcggatacatggtttccaccgaatcagtcatgttttcaaggcttatggagttaatattattgctgtccaccgccacagacacatcgatagccgccccacccagcgctacagatgtgttgtacacacccggtgtatacatgccggtttcttccaccttgggctttggttcatcacctgaaaaataatatgtagcagcgaaaattatcagaagaagcagtatgccaaggagcactccggtcagaatgacatgcttcatttttacaacaacgatttttgtttttgcactcatatgcgcctcctgtggttgttttatatataatatgtgtggggatgcaaaagtatgacagatattcctgtctataacgaaaaagagatatccatcaaggatatctctttatgttataagagcgatagactggcgcaagacgtccgggggacgtctgttctgcgccgaccgtttcacggcttccggggggatcctgaaatccttatgcaaatgtataagctatactaggtacataatcaatgatgcatccgttgataaaaaccaacacaatttaggagaaattaaaggttgagaactaaaacaactatcactttccaggaattgatatgcaggatgccttagagtgtttaaacaaacgcaaattttcttaaccaaataagtggttaattaaccaaaccgtgccaaggctagacaaagaaaaaaccttgtaaacactgggtttacaaggctttccgtaaagagcgatagacggggctcgaacccgcggtctcgaccttggcaaggtcgcgcgttaccaactacgccactatcgcatttattaagttgtgtgctctcttgtgtcgagcacgtgttatataatacacgatagaggagcatctgtcaaccacttttttagatttttttgtaactattcaaagccaaatgttttagtctttatttacatttgtgtgtctaatgtataaacagtataattatacatttcacgaattgcgtatgcaattagaaaatcaagtagtccaaattccataaaatgaaattttagggcaaattacagacattagcttggctgtagtatttttaaacaacatgtgttagactactgttatataaatcggaatatagtgagggactataaataccattacttcataacggggaggtgagattttatgtattatagtaatcctcagaggtacaaaaatggagatagataattggcagactatgatgctaatttttgaggtggtgtgtagaattttcaaaaaacaaggaggaaaatatggaacggtttattcggaaattatttggtttaacctttagtgcattattggcaggtgtgcttttagtaggttgtatttcgaaggatttaggagatgaaaaatctatgaacataaagatagatgggatagaacagattacagtatcaactcaaactaccggacagaaacaagatgttataatagaaaaagaaaaatatgaggatttgataagtaaacttaattcgtattcgttaaaagaaataacagatgaaaaatataaaggatggcagtatttgattaaaatagaaaaaaaggggggagaaattactctaatatgttttatggataataaagtcaaagtgaatgacatcgtttatgaagttagagattacaatattgatgacttttcatatctgtttgagtgaattttgaaacgaacgtaaaagtgatgaatcaaaataaaaagcccatgagaatttttctcataggctgaacaaagataatgataaatgattttttacgaaaaaagcggctatctcaaaggatagccgcttcaactgtagacagaagtatttctataacttaatttttcaaaaacagaaaccttaaaaaaagcagtattattaaaatgatagaaacatatttttctgttttactgactgtttgcataggaaagtatttctctctacagaaagagtaaatcatgctacaagcaagtgaaatagaaaaaaatattttaaaattcatagtatctatgtgctcaggacaaaacatcataatagcccaaagaatcacgagccaaagaactattatatagtggaaaattttttgaatcttattattatccatatcaatcactcctttctttaaaagtgaaatagacagatgtcttacttgtttcaataaccaaaggaattacttctttcttaaataggtttacattagttttgtgtcaacaggcaaaaactatgactataaaagtcaccaataagtaatattaagtcattaaaatgataacacaaatcctttctctaagtcaaatattcagaagtataatcgcttcacagcatccatcgcaagcatcgagcgctcacattcttccgccgagagtgtaatctgccagcaaagcggactatctatcatatgctttgccgcatagcttagaccataattcccttcacctgattaggtgtcatgttctgcgcttcttctattataaggttatctgaaaaaatttaaaaaaatttcaaaataactgttgacagatgctcctctatcgtgtattatataacacgtgctcgacacaagagagcacacaacttaataaatgcgatagtggcgtagttggtaacgcgcgaccttgccaaggtcgagaccgcgggttcgagccccgtctatcgctcttataacataaagagatatccttaatggatatctctttttcgttataggagtgaagcggagccgctcgctcgtggctttcgccacttgctttggagtgtttacaagtgataaactttctcattaagtccgggagggcgcatggtatggggatttgagggcatggattagcgctgactgcgtgagattaggcttgaataacagtatttccgggaaatataatgtttcttgtaagtaaactttaactagaatttttgtaaatatacaggaggaaaacattatgtcatttaattggaaagcttcaggtttattcgcagcaggtgttgcttttggtacagcaggtatcaagattttatcaagcaaggatgctaagcgtgcttatacacagtgtacagcagctgcgcttcgtgctaaggattgtgtaatgaagactgttaatactgttcaggagaatgcagaggatattcttgctgaggctaagagtatcaacgaggagcgtgaggctaaggcagaggctgctaaagttgccgatgcagctgaggatgtctgcgagtgtgctgaggctgatgagcaggaagcagagcaggctgaggttacagcagagactgctgaggcatagaagataagaggcggtcatatgaaatttacgattaagcatgagtcaagaggccgtatgcgtgttcatatggagcagtaccgcatgacatatgagcaggcagacactctgctttatgtgattcacaatcacaggaatgttacctttgtaaaggtttatgacaggactgctgatgctgtgattgagtatgtaggagacagagagcagattatagagctgctacgccactttcattatgagagcgccaatgtgccacagactgttatcaagacatcaggaagagagcttaataattcatatcaggaaaagcttatcggaagtgttgtctggcattacagtaaaaagctcctgctgcctttgccaatcaggatagcgcttactattggacaatctgtaaagtatattggaattgggcttaagtgtctgctgcagagaaaaattgaggtgccggtgcttgatgcgactgccatcacggtttctcttattactaaggatttttctaccgcaagctctattatgtttctgcttggaataggtgagctcttggaggaatggacgcacaagaagtctgttgatgatttagccagaagcatgtcacttaatgtgagcaaggtatggctcaagacacctgagaatcaggagatactcgttgagtcttcaaagattgaaaagggcgacaaggttgttgtccacatgggaaatgtcataccgttcgacggagaggtcttagatggcgatgcgatggtcaatcaggcttccctgacaggtgagtcggttccggttcaaagaactgtcggcaatactgtgtttgcaggcactgttgtcgaggagggcgagattactatcagggtcaaggaggttgaaggaaacaaccgttttgaccagattgttactatgatagaggagtccgaaaagcttaaatctgagctggagggaaaggctgagcactatgctgacaagcttgtgccgtggacgcttggagctacagggcttacatatcttctgacaagaaatgtgacaaaggctatgtcaattctcatggtggatttctgctgtgcactcaagcttgctatgccaatctcagtgctttctgctatcagagaggcaagcctttataatgtaacagtaaagggaggaaagttccttgaggctgttgcggaggctgataccatcgtctttgacaagacaggtacactcacaaaggcacatccgactgtggttgatgtggtgaacttcaatgatgagtattcatctgatgacatgcttcgtgtagcagcctgtctggaggagcatttccctcattccatggcaaaggcagtggtagacgctgcttctaagaaggggctttcccacgaggaaatgcatacaaaggttgagtatattgtggctcatggaattgcaacctcaatcaatggcaagcgtactgtcatcggaagctatcatttcgtctttgaggatgaaaaatgtgttgttcctgcaggaaaggagtcactgtttgagttgcttccgctgtattattctcacctgtatctggctattgagggtaagctttcggcagttatctgtattgaggatcctctgcgtgatgaggcagcggcggttgttacttcattaaagaaggcgggcatatcaaaggttgtcatgatgacaggcgacagtgagcgtacagcttctgtcattgcgaaaaaagtaggtgtagatgaatactacgccgaggttttacctgaggacaaggctgcctttgtggagaaagaaaaggctaagggcagaaaggtcattatgattggtgacggcataaatgattcaccggctctttcagcggcaaatgtcggtattgcaatcagtgacggtgctgaaattgcacgcgagattgccgatattacggtgggctctgacgatctctaccagattgtaactcttaaatatataagtaatgctcttatgaaacgtataaagagcaactatcgaaagattgttggttttaactcagggctcattgctcttggtgtggcaggtgtgcttccgccgactacgacagcacttttgcacaatggatcgacaattcttatcagtgtgaacagtatgaagaatctgcttgagtagattttggatgtagtacggggcgctgccagcggcagcgccctttacattgtggtggaaataatgtaggaattgtgataaactaactgataagtagtgcagattatttttatatgaggttagattattgaaggttgaagaggttataagcagggttgcagacagtatggacgcaaaatttgagagacgttttaaatctttttgtaattcactagatgcgttagctgaggccaggcagagagaccttaccgattcgtttgttttgagtgggacaggtgctaaatttagcattacttttgatttatcgtggaaggtaatgaaagatattctggtacaatattattcgataaccgggtttgttacaagttcaccgcgagaggtgttacgtgaatccttcaaggcaaagctgatttctgatgatgcgtggatggatatgcttaaggtcagaaatgaacttgcacatgactatgattgtgaggttgtaaggacacattgtaatacaattgttgaaaaatatattgatttgttttatgattttaagaatacgatagatgaattattgaaggttggataaatttttacgtagatatatctaatgcacaaaattaacacaatatagtaataaaacatagaattaaagatagcgatgacaaatatagaagttgaaataaacgataattatatatgtgtatatgagaggcttaatgacaattgcattaggcttcttcatatgtatgggaaaaatccggtgtgtgtggtgccggatatgcttgacggcatgagagtgacggagcttgcggagtattgcttttctttcaagagcatgcctgaaaaattgaaaacagagcttgggattgatgatattctgcgtcctgatatgacggagctgtgtgatgattatatcgagagggtcatattgccggacggaatgcaaaaaattggcaggctgtgcttttataattgttcaaggctgtctgtgcttgagctgccattcgacatatgtgatgtggatggtgacgctttcatgaactgcacaaaactttatatgcttgtgatgagaggctcaccgaaggataagtcgtgtcttaagcagattctttcacagataagcactcttgtgagggttagatgggctgacagcgatggaaatgcgattgcgcaggcatgttttttcgagtacgaccagacatatgatgagattggtcctgctcatatttttaaactgaacatgaacggagaaggttttcgcgccagacaggcttttatggaccgcgtgtttgtgtggaagcagtatgatgaaatattttcagaggcgattgcgcaggagagtgaggatgaccttttagatatggctttttacaggcttatttatgcgtatgagctttcaaaagaagctaggcagcagtttttggagtatattgtcaatcataaaaaaaggctgtctgagcttatcataagaaaaagggattcgggtttgctgcagagttttctggagcttaaagacggtgaggagaattttatcgcagatgtcctggctgttactgatatgcttgcacttgcagcacaggatgaatggagtgagggcagtgtgattttgcatagatttaagaaggaaaatctgtcggtatccaggaagaggcggtttgaattttaaatttaagtgtaaatgcaaaggttatgttattactaaaaaatatttgacttttttcaaaaataaaaatataatagcctatgaacgagtagcagactagcgtaaatccagtttagctgctcgtttttttgtgcacctgctgtcgcacatcattaaaatatatagtgcattataaagtgtgtagcttatcagcgtaagtccagcttatgagataagagcgcactttttttatgcagaaaaggaggaataagttaagatggcagaaagtaacaagatgaaggacatgccggtaaataagctcatggtacagatgggaataccgatgattttatctatggcattgcaggcagtttacaatattgtagatagcgcctttgtgggaaatatgaggtcaggaagtgaggctgcacttaatgcgctgacactggtatttccggttcagatgcttatggtagcagttggaattggaacaggagtgggaaccaatgcacttcttgcaagaacacttggtcagggaaatagtaaaaaagctgcaaaggttgcaggaaacagtttatttcttggtgcaataatttatatagtatgcctgttgtttggaatttttggagttaaagcttatatttcatcacagaccgttgatcctcaggttatttcaatgggaacaaattacttgagaatatgctgtgtgatttcatttggaattattttcttttcactatttgaaaagctgctgcaggcaaccggacgttctctttattctacaattggtcaggtagttggagcagtggtaaatattattcttgatcctattatgatttatggtattggaccggttccggaaatgggagttaagggcgccgcatatgcaactgttatcggtcaggttgtgtctgcaatactgctgtttgtgtttcatatgaagctgaacagggaatttgagcatgatacaaagtatatgaagcctgatggaggaataatcaaggaaatttatgcaattggacttccggctattattgcacaggctctgatgtcaattatggtttatgtgatgaatcttattttgaaatttagtccttcggcgcagactgcatatggtttgttttataaggtgcagcagtttgtattgttccttgcattcggactaagggatgcaattacaccaattatagctttttcatatggaatgcacagcaaaaagagaattaaggatggcatcaggtatggattgctttatacgattgtgcttatggtcatgggagtagcgattacagaaattttcccgggagaatttgctgctttgttcaatgcaggagcatcaagagaatattttatcggggcaatgagaattgtttccatcagctttatttttgccggaataaatgtggcatatcagggtatttaccaggcgcttgatggtggtatggaatcgcttgtgatttcactgctcagacagcttataattatattacctttggcaggcatcttctcattttttgtaagaggcggacatattggagtttcgctgatctggtgggcatttccaatcacggaggtgactgcttgtattgtaggatatttatttttaaagagaatcaataaaaataaagtggaaagcttaaattaaggaggcataagccatgacaaaaagaatcattacgataagcagagagtttggaagtggcggacgttttatcggagaagaagtcgcaaagaaacttggaattaaatattatgacaaggaaataattggacagattgcaaaagagtcaggactggcaccggagtatattaaggaaaatgctgagctgtccccaaagaaagggatttttgcatatgcatttaccggtcgtgatattacaggaaaatcagtagaagatatggtatatgaggcacagagaaaagtgattttggatttggcagaaaaagagccatgtgtgattattggaagaaatgctgattatattttgaaagacagggatgatgtattgaatgtgtacatccatggggatatgccggaaaaaatacagcgtatctgtaagctgcataatacttcagaagctgatgcagtaaaaatgataaatgacatagataaaaggcgtatgacaaattataatttttacacagatcagaaatggggaaaagctgctaattatacgttgtgcctgaacagctcacagctcgggtatgataaatgtgagagtataattattgaatgtgtatagtgtaataaaatacactgtttaagatattgtttgtgcattacattttattgagaaaataaggttactatagtataataaactctgaaaatattgcagcagaataataggggttgtgaagtatatgggaaaggaggccgcttcatgaaaaaacatatccagacagattcagagtggcaggaggaaatgtcacagaaaataatagatgaaatacagtgcgagttgtatctcgacatgccttttatgaagctggcgctctcggctctttccacaaaggtgaacgagcagctttactccatggcaactgacggcacatatatttattacaatcccatcaggctgattgatatatttaagaaaaatggcatgtatctgaaccgggcttatctgcacagtgtactgcactgtctgttttttcacctgtggactaaaggtgagagggatgaattactgtggaatacagcatgtgatataatggttgagtacacgattgatacaatggaaaagaaaagcacaaagcgtatcctaagttatataagaaaaaccacgtatgagaggcttaaaaaagagcatatcgtgattgctcccggagccttgtacgcgtggctatacaagcagtatgcagaaataaaggctgaagaaatcactgatatagatgatattgcaaacacaaaggataaaaatgagcttgcacttctggcacgggaattttacacagatgaccacgctttgtggccggaggagaaaaacgacaatgctatgccactaagctcatccgaggcccaaaagcagtggcagaaaatatccagacagacacgcatggagaaaagccattcaaaggacagcaaatccgagggcgagcaggtaatgatgagggaactgtccgcgaaaagaagcagacgaagctacaaggagtttctgcgcaggtttgcagtgcttcgtgaggaggtacacgcagattatgattcctttgatatggggtattacgcgtatggactttcgctttacggcaatatgccgcttattgagcctcttgaaacgagggagacatacaagataagggattttgtcatagtacttgatacgagctattctgtgagcggggagctggtggagcactttttacaggagacatttacgattctcacggagtcggacagcttttttgtcaggaataaaatacgcatcatacagtgtgatgacagcgtaaagactgacgaggaaattacagatgaaaagcagattaagccgcttttaaacaagtttacgctcgtaggaggcggaggcacagatttcagaccggcattttcgtatgtgagagaccttttggataagggtgagcttaagaacatgtgcggacttatatattttactgatggcaagggaattttcccggcaaagtgtccatcgtacaagtgcgcatttgtgtcggttggtgcatatgagggtaatgaggtgccgccatgggcgatgcaggtggagctggaggaaacaatatgaatataaaacaggcaaaaaacgaagtgaaaaatacagtgaaagcatacctgtcaaaggatgcacatggagagtacgtgataccgcagatcaggcagagaccgatgctcttaatcggaccgcccggcgtaggcaagacacagattatggagcagattgcaagagagtgcaaaataggtcttgtggcatataccatcacgcatcacacgcgccagtcagcggtaggactgccgtttataaaggagcgtgagtatgacggaaagagctattccgtcacggaatacacgatgagtgagattatagccagcgtctatgaaagaatggaagcaacagggcttaaggagggcatactttttattgatgagataaactgcgtgtccgagacacttgcgcctacgatgcttcaatttttgcagtgcaagacatttggtaatcaggctgttcccaagggctgggtgattgttgcggcaggaaatccgcctgagtacaataaatcagtgcgcgattttgatatggttacgctcgaccgtgtcagatatatatcgatagaagcggactatcaggtgtggaaggaatatgccagagatgtgcatatccatgatgcacttttaagctatcttgagcttcacccaaacaatttttacagggtggaaactgacgtggacggtatgaatttcgtcacggcaagaggctgggaggatttaagcagcctgcttaaggtgtacgaggcaggagaaattgcagtcacggaggatgtaataggtgagtttatccaccatcctgatatagcagaggatgtgtacgcatatctggaaatctacagaaaatacaatgaggattacggtataagcgatatattgtccggaaacgtgaaaaagtcagtatataaacgtgtgtttgatgctgattttgatgagagaatcactgtggtgaatctgcttttaagcggactgacagttgttttttcggatgtggccagagagcggaaaatggtgcagctatggtatgagtttctgaaggaatatagaaagtcacaaagaagccctgaagagcagcatgcgctgtacaacagtgctgtggaacagttttcaaagaatatggagatattgaaggagagctctcttattttgccaaaggagtattacatcagacaggatgtcttaaggcatatcaagggtgattttgatacggtgatggatgattttaccgaagaatctgagaagctttcaacgatggaggatgctgcaggagagaagctaaaccacgcatttgattttgtggaggatgtattctcggacggccaggagatgcttgtctttgttacagagctgaccatcacaccggaaatcagcagctttttagctgagaatgagtgtgaaaaatttgatatctacaatgaaaagctcatggttggaagcaataggactaagcttttaaaggagcttgagagataaatcctgttgatgtatgcagagaagatttgaaggaattatctatgatttatatatttagcgctttttatgctgaggcaaaaaatataatagaccactatggcttaaaaaaggaaaaaagccctgaaatggtgagatttgatgtgtttgcaaatgagagtatcaggcttgtgataacaggcgtaggagaaatcaatgcggcggcagcggtttcaaatattggtggtgcgtatgggatttcaacggatgatgagattttgaatgtggggtgtggcgctggttttagcagtgatatctgtttgggcagtatatttctgggaaacaagctcactgagcagatgacagggcgtacattttaccccgatatgctgatgaaagcaaatttcagggagtgcgaaattgtaacggtcgcaagggtgcttaatgaagggtgcgattcggttgtatatgatatggaggcagccgccgtttatcaggcagcagcgtttttcgtgggaccgcatcgtatgcattttataaaacttgtttcagatgccggtgagagaattgaccagtcgaaaatcacagagctttttgctttgcaggaagacaaaatatgcggctatattgatatacttttaagtgtaggtggtaataaaacttcaatagatgataagactaaaggcgaaaatatggcagacggcaatgcgacagatgatactaaatccgcttggaatattgacaggctgaccagcgatatgcgctgttccaaggtaatgggagatcagctggcacagcttataaagtattgcagactaagtggtatagattataaagctgttctggatgagtactatacaaatggcttgctgccgtgtgagagcaagcgtgaaggaaagaaatgtctgtttgaattgaaacagagattgttgtaagaaggaaatgtcaaatgtgtcaatacaataaaatgttttcacatgtatatgtggaaaaaggcgtggccgagcatccacgtacaaagcagattttagaaaagctgaataatacaacagtcatagaaattgaccattacaaggatgttttctgccgcaaaaagcagagtatttctgctcaaagcaatgccaaggcgctcattctggcagagaatacaagtggctgcatatatgaaggtgcaccggtgtgtcagagctttggaaatgagaatttctactattgctcatgcatgatgaactgcatatttgactgtgaatactgctatttaaagggcatgtatccgtctggtaatcttgtggtgtttgtaaatttggaggatatttttgcggagcttgaagcacttctggcgcaaaaaagcatatatctttgcgtatcatatgatgcagacctcgtggccatagagtcgcttaccggctttgtgagggaatggattgcttttacaaaaaagcatgagaatcttacaattgaaatccgcaccaagagtggcaggtgtgatttgtggagcaattacgaagtctgtgacagggtaattattgcctatacagtttcgcctcaaagggttgcagcagagtatgagcattttgcgtctgcacctatggagcggattcaggcagcaaaatgtgctatgggtagtggatttccagtgcgactgtgctttgatccgatgatatactgcaaggactggagaggggaatacagcaggctggttgatgacgtattttcacagatagacggttctaagctgtgggatgtgagtatcggaagctttcgcatatcgcaggattatctgaagaaaatgcgaaaggacatgccttgtagtgctgtggtgaattttccatacaacaatgtgaatgggtattaccagtatccggaaaacatacgaagtgatatggaagagtttatgatacaggctgtatccgaatatgtggataaggacaggatatttatgtggaagtgatattattgcaatacattttcaatatatacacatagtataaaggagcaatcagatgaacaaagcaattgtaaccggggcgtcttccggcatcggaaaagctatatgcaggcagcttgcagcgaatggctggttggtttacggaataggaagaagcttcgatcaaagtgatgatattgcagggatagagcgtatagtatgcgatattaccgatactgcaaagctcatcaagacaataaaagaaattaataaaaatcatgacatatcacttctcataaacaatgcaggcgtcggcttttacgctcttcatgaggaacttaatcctgtaaaaatatcacagatggtgaggacaaatcttgaggcaccgatgattatcacaaatctgctgcttcgcgatttaaagaaaaacaaaggaacaataataaatatctcatcaatcactgctgaaaagacgaatccgcacggctgtgcctatggtgccacaaaggcagggcttacgagcttttcccacagcctgtttgaggaggcgagaaagtacggtgtgcgtgtggtaaatttagagcctgatatgaccgataccaatctgtacaggaatgctgattttacagtggatgaaaatgaagctgcaagaatacagccaaatgaggttgcagacgcagtgctttatgttttggggcaaagagaaggccttgtgatgacagatatcaccataaggccacagcttcacagaattgcaagaaagtaaagtgtttatattttaaaaagcatcaaatgccattcgaacgattgacttatagtcattaagcgtctggcattttttaattttcttccagagcttttcagagtcagaaaacagcccatgcatatatgcccagatttccttcatgcggaaaatggcatccttttcaccggaaaagatggacagataaccggataaaatctcatcatgccagttctttaagcgctcgcgaagctcggctttatccatgcttatacccttaagctctgcgataagagcaggatttgcaaacagtccgcggcctatcatgatttcatcaatatcagggaagcagtcggttagggcattaaaactattagtatcagtgatatctccgttgtagcagagtgttgttttatcaggatttattttctgcatggcgagggcgaagtcatccatgcgcggcgtatttttataaaaatccttctggactctcggatgcacggtaagctcacttatcggatatttactgtatatttcgataagcttgggccatagctcatcatcgttaaagcccacgcgggtttttattgaaacaggaaaatcagcttttgtatacagctcatcgaggaagctatccagcatatcaggatatgcgagtatgccggagcctcgtttcttggatacgacggtgcctgacggacagccgagatttacatttatctcatcatatccgtaaggaacaagctgcctgtgcaggtcgatgacctcgtctgccactatagacatggcctgcggtattagagtgattccgtcgttgtttaccgggtctatgtctctttttatcttggcattcatgcgctttgcggcagggatgaatggtgtgtagtatttgtctatgtagtcaaaattgtggtggaatgcgtttcttactgtatatccggtcagcccttgcatcggtgcgagaaaaaatttcat

SEQ ID NO: 535 - DNA, 23614 bp, unidentified
  source 1..23614: mol_type = unassigned DNA
atgaaaaagaatctgagatatatcatcgcgtcgctgctggcgctcatgatgctgctgagcctgtgcgcctgcgcccagaccggcactgccggcaatagcggacagttagaccttgactatgtgggggaggataccgaccagcccgaagaggaaaagccgtggtattcctggtttacggaggccttcagcttcggcaagaaggacacggcccccaccgcgcccagcaagcctgatagtgtggcagatttctactctcagggatcttcggatgcaccggaaggcaacaagagcaacaaggcagatcaggccactcctactacgcctgacgaggagcctgcaaatatcacaacgccagattccggcggcaagaagaacgacggtaagaaaaacgaccagaaagctgaagatagcaatactcccacacctacaccggatcagaagccggacagcaagaaggataccgtcaccatcaccatccgctgtgacacggcggtaaaaaacggcatgcatctggagagtaagtgggcgggcatcgtccccgcttctggctgtattctggatgtgaccacagtagagattgagcaggggaactcggttttcgatattcttaaccgtgtgtgtcaaaaatacaagattcacatggaacaccgcagcaagaattatataaatggtatcaataacctttacgagtttgatggcggtcgctggagcggctggatgtattcggtcaacggatggtatcccaactacggctgcggtacgtattttgtcaaggcaggagacgtaatcgaatggaactatacttgcgaccttggcagtgacctgaatgcaaagatggacggtgccgaagactggaaaaatactcatgactgatttctaaatccgattcttcggggaactgcatccggcggtcagaatggcatatttcgtactggcgttgggtgccacatgaggatgagagccgagacttgttaagaccaagttagctctaacaggatagatattgccgccctccacatttgagatagcgagagagaattatgagcgaacgaaaaaccattataaaaacggtgggtctaaaaaaatactataccgtgggcggaaacactgtccgtgcattggatggcgtggacgtatctgtgctgcagggtgaatttgtctgcattgcgggccgcagcggttccggaaaatcgactcttctgaatatgttggcaggactggagccgcccaccaaaggggagatcatcgtccgaggcaagcatcatctggaggccatggacgaggagttacggacaaagttccgccgccgctatatcggcttcgtctttcagaactacaataatttgccccaatacacggcgttggagaatgtggcgctgccactggccatccggggcgtaccggaggatgaacggaactggctggcgtggcaggccctgagccgtgtgggactacgcggacacgtagatcaccggcctgcggagctgtcgggcggccagcagcagcgcgtcagtatcgcgcgggccatcatcaccgagccatctatcgtgctggcggacgagcccaccggcaatctggacagccgcaccggtcaggaggtcatggagctgctgtgtgagatcttccgggagaggaacaccacttttgttctcagctcacatgacccgcagatgcagtgttatacagatcgtaccgtctatttcagtgacgggaaaatagagacagagaatcaccacaccggagaggagcgcacacagtgaagagagaaacggtaaaacgggtactggccctgttgatctgcgtattgatgacagtatccctgctgcccaccgtcgctatggcggaagaagtcacggaggatgtgatagatgacagcaccattgaggcttacacgtcttacgaaaacggagaggatgccggcgtcggcggggtctcggttacggacgaaaagcccaacacggatatcaaggtcatacccagcgacgccaacgccctgatcctgatggataccggcgcacagtcccccaaaggcgttcccggtcaggtggtgaagatcgtgctgccgctggcggtgaataaggagtacctgcccagcgagaaatacatgctgcgcaacatcaacatctatcccgatgtgcctaccgacgccagcgtgtccaactggccctttgagctgatctacgccagcgatgtgcagcacttaaaggatatgtcctacaactccacggcggaggtgtggttcgagttcaagatcagcgagtttgccagtaagggccgttacgccgtgccctttaagatcaatgccactgtgtggcgggaggatgccgtgaacggcaccaccatcaccgaggacgtgaccttcaaggtcagtgcctatgtgaccgttaccgacaaccgcaatatgtccggcgtcactacctccttcggcagccttcaggtggcgggtaccaatgcgggcggctcctacaccgtgcctaccggcacacccaatcagactatctccatgcggatccccgtgatcaatgtgggcggcaccctgaccagcgtgacggtctatcccgtggtctctgccgcgctggacgagttccccttcgtgatcgactccaccaatttgggcaagtatttcgactactgggccagcggcgaggtaaagtatctggactacaccttcacggtgtcgccctttgccacctccggcaacaagtccattaaattcaaggcaaattatttcgagaacagcgcccctgcggagggctccttctccacgcagtttactgtgatcgacggctatgacgcctccgccatgtcggtgatggtgcagagctataagctgtatgtggacgataccgaggtgtccggcctgatggcaggcgaggagacggagctgcgcctgaccctgatcaacaactccaaatatgacacggccaagaaaatcatctccagcctggtattcaccaattctcccggtctgacgctgtgcgtgggcggcacggataccgcctgtgccgactccatcaagccgggcggcacgacgatcctgaaatacaagatcatggccaagcaggacgcggaggttggccccgccatgctgggcatcaatctaacctatgagaccaccgaggcggtggccggtaaggcggcgcagaacatcatgctgcccatcagccagaagatggacattctggccggtacgccggaggtgtacggcacacccagcaaggataaggaatctaccatctccgtgccgctgaccaacatgggccgtgccaaggctatgaatatccgggtgctggccacggacggcatgaccgcctccaccccctgttatgtgggtgacctgctggcaggcggctccaccagtgccgatgtaacggtgggcttctccaagatcggcgcgtttgtgggcaagatgatcctccagtatgaggacgccaacggcgagacgtattctcaggacatctccgtgcccctgagcgtggcggaaagctctgcggatacagatgccaacagcgtcaacgcaaataaggacggcacaggcagccgctggtggctgtggctgctggtgattttgttggtgctgatcatcattgcgatcatcgtctatgtgatcatccgctataaacggggcgagattgggcccggtgctgaaaacaccgctgccttggacgactttgacgacgactttgacgcagacggcggcaccccggatattggagagaagccgctgacccacgatggaaacaataaggacgggaatgtatgaagccgagagatctttttcactacggctgtacgaacctgttccggcgcaagacccgcacggccctgacagccctatccatggcggtgggcgtcatgtgtatcgtggtgctgatctccgtaggtctgggctatgagcaggcgtaccgcgagagcatcgaggccatgggcagcctgacaaaaatcgatgtgacgcctgccaccggcgattacggacgcaaggcgctgctgaacgacaaggcgctggaggccttccggggcattgacggtgtggaggcggtaacgccggtctaccagcagtccgcctacatcgtctccggcaactatgtcaacatggtgcgcgtctacggcatcgacatgaccacggcggaaaacttcatgctgacgccggagcggggcgttatggccggggacggtacacacctgcatccggaagtcatgttcacagacgacgtggcggctggccttgccaacaaggcaaaggattgggaactggcagtagacgagaatggcaacgccctgattgacctgctggaggtgcctgtccgcatgaccttcgattcctccagcctgaccggcgagccgaaggccgataccgatgggcgggcgctgccctccggcaatctctacaacttgcgggtaaccggcatctgctccacgctgaacaacaacttcacctcctccgcctttatggcctatgaccggctggaggagatggtgcaggccaacgccaactatctcggcgctgccacggaaaccaaaacggcggaggaaaaggccaacggccctacctatgatctggtatgggtgaaggtgaagaacgtcaacgatgtgcagcgcatcgtcaagctgatccgtgacacgggactgaacacctactctctcaatgatatgctggagacggtgcggacgcagtcccggcagatccaggggatgctgggcgcgctgggcggcatcgccgtcctgatctccgccatctgcgtggcaaacaccatgatgatgtccattacggaacggacgcgggagatcggcgtgctgaaggtgctgggcaccgttcgcagcgacatcttcaagatgtttctctcggaggcactgatcgtaggcgtgatcggcggcgcggcgggcttggcgctgagctttatcgccaagtggctgataccggtgatcttcgcatcccgtgagctgcggtgcgtactgccctggtggctggcggtctgcggcgtgctgttcgcaggcgcggtagccattgccgccgcatggatgcccgcccgtaaggcgacgctcatcagccccaacgaagccatccgctctgagtgaggaggtagcatttatgaaaaagatatgctgtgcgattctggccgtgctctgcatcctgccgtgtctggcgggctgcggaaaaaaggataagtatgtagagtatcgtataaccttatcagatgatcttactcagcctggaacagttaccatgcagttttatgattactattttgatatggagaaagtctccatagaagatgtgcagaccggcgaaattgagactaactactatgccacgggtacgtttctatctgatacgaacttagcgaacctccccgtactgatccactttaatggagatgttcttacattggacggtacaatggtcaccacggcttctcccattatgctcatgctcgatttttctgagggcaaaacacacgaaattggcctcgagtttgatgggctcacaagagtattttttgcatcagccagttgctcataaataattgtgggcaacatcaaaatagaagtgttaaggaataggagggagtacccatgcagtagttaggaattgcaagccgatccccaaagccagctattctttgtggagtgtggatagctggagagtcacgtacactcctggaacaaatttattgaggaggatcaaaagatgaagagattcaaaagtctctccgcgctgtttcttgcgcttgtccttgcgttaagtctcagcgtccccgcgttcgcggcaacaggtaacaacacgatcacgtccattaagtataataccgaatcgtttacgattaccccgtatacctacactggcgatgatggcgatggcgagagctttaaggcatattcctgccaccttgagtctgctaacgttaacaattccgtattggcgaacatgccgcttacggtaacgtattccggcggcacgctgaaaaacggaactaccacctataccggtggcggtacggtgacaacctatgttaatgttatcaaccgtgttgcagcactgacgctgaccagcaccaacggcgtaaccgagacctactatatcagcgcatggaaaacaggtaccacattctatgcttctgtgagtgtcgagtttaatactgcctatgcgttctctcagacagcggtcaatacgaagtatacgggtgcgaacaccacccagaacccatatatgcaggcgaccaccgctacgcagaaagcgactgcccagtctgcgtatgaagagaccaatgatgcttttaagggtagcacctccgacacttttaacggtctgagctatggttataccgcggccgatatcatcacccagatctgcaacgcgaagggtgtgtatatctccaatagcagcggctatatctcccagatcggcgcacttaatcaggacactgccggccagtatgttcatcctcagtggggtggcccttacggctctggtggctggatgttcaaggttttacgtggcaacgacgcgatttacccctccattagcgcaggttctttctacctgatgcccggtgatgtagtcacttggcagtataccgctgacgttggttacgatctgggtgcgcccatgttctaagcgacacagcacttaaaaactattccttaacacttgggggatgcccggtcctttctgggccgggcatcccctgccaacataaagcgtgtgtatgctatgaacaggtaggagaaaatgaccacaaaaaacatgaccaagatttggaccaaaatttggatggtattgctggcattgcttgtgctgatagggtcactgaagccggtcacgacttatgccgtcaccggtggcttgggtgtattcctctactggccaggcgattttagctcaaacggaggcttcccccaaaacacatataccgacatacaggtctactccgaggagtacccggatgcaggctcaatgaacaaggtgacaaatattcaaccggagattttctatattgtcactatcccaggactggacgcagccacggcatcacgtaagagttacgatttaacactgactctgaaggaaaaaaacaatgacgcaccggaactaaaacttcctacaaacaattactatttaccggttcgcgttacatggaccgcgaatgatggacggcagtgcgatatttttatcattgcgatccctgaaattcgggattattccaaggcggatttcagtaagcctgcgcaaatgtacttggatctgttgcttggaaatgaattggacgacttctataacagccttgccgcaacaaaaaagggtgtggctggcggttattatattgataattatcgctgtttgatgcgaatacttaactccactaactggctttgtgcgggttttctcgattcgtataaagattactatagcaaatctgaggatgcacttgcagaagttcagcagacacttaaccaggacggttggttttctcccgagcaggcaaccgcatggtttaccgacgtgctggggtactattgggagtattgtgaagcacgcattgaagagccggagctgctgtcgctgcaggtcatgggcgttgatgcggtcaaggtatctgagtcggagtattctctctgtctgccggaaggtgtgaactggaaaaaggcttcgtcatcgatcgagtaccgcgcaaacaccatcaacgtttttgaagcgaagggaaactggactccgggagcgggaataatgctgctgctgagtgcaaaagatcctgcgacaaacactgtatataactccggcactaacggttatgtacaaggcagctattatctgcggctgagttcgagtacggatgagccggaattctcggtacattccttccagatcaatgaccgcacggcgagcattgacgaggagcatctgacaatctcattgcattttgctccggactggttgccgaaacagatccctcaaattacctgctccggaacaggctatgaattcctggatgccgctgggaagaccgtagagtctgacgaaaacgacaaaatcgacttttcaaaggccaaaaagctgcgcttatatgaggatctgacgtcatatgcgcaggcggggaaagataccgagggactgtcttaccacaaggactatgagctaaatttcacgcagggcgattccgctgaatgtgagttgttgtcctactccgtcggtgtggcgggtgagcagatcgattggagtgctgacggcaagacgatcacggtaacgattccctacgcgacggactggaatacgctcaagagcagctataccatatcctatgacgcgaccgtcaccatgccgaatggtgaggattttgaacactccgagaagacacctattcaatacacggtagctgcggagaatggaaacgaccaacggacttattctgttattgtaaagaaggttccccctgccaccggcaatgaaatcgagagcttctactgcggatcattggaaggcacgatcgacgatgatgcaaagacaataacgcttgagttgccggaagggtctaccaagcgctttgctccgcagatcacaatttccgaatttgccgttgttgagccagccagcggtgtacttcaggatttcaccgagccggttccctataccgttaccgcacagagcggcgataccaggacgtacaaagtcattgtaacggtctctacgcagcgaagagaaaatcctgataaatcggcctatcaggctaagttggacggaatcatcgataaatatcgggagagcgcggtagacgactgggagtggatgcagcttggcatctacgaaaatttgccgcaggacaacgggccgaacaccaacaacgggtttgatattgtcaaagagatcaaagacttgaacgttggcccgaaaggtagaatgacagacatcgccagactgacgatgctcctgacctcaagagggtatgattgttcaaaccttgccaagtataacggcggcaagccctttttggatggaagcaacaatgagatagacaacctcgttgcaaatattgcgtccacaactgacggtggtgtaaacggcagaattttcgcattgtgtgcgctggacatgggcaattatacgcttcccgccaatggggcgagaagcagggagtccttgttggagcagctactcaatcatgaatatgggtcggacggctatgacgttgatatggtcggtatgctgatgtacgctattgcgccgtatcaggaggtttctggttatgaagaacggacaaaggcaaaactggacgagggtgtcgaagccattttgaaagaaatgcgtgaagactacacgttccactcttggggaaccgtaaacagcgagtctgttgcacaggtcatttgcgcattggcctcttgtggcattgacccttattctgacccccgtttcggggacggtgaccgcacgatccttacacagtggatggatatgttttccacgccggatggttttaagcatgtgcagagcgaatctgccagcaacctgctggcgacatacgaatcctgttatgccttacagtggtatcttggtttcctggagaacgatgaggcggggcatccgtactatctgtattatcatcgatatgatttctccactgtgctttcttcggaagctaacatactggaattctctattgagggtcagaaaggtgtcttcggagaggaaaatggtcaaaacaccatttctgttaccttgcccaagggaatgcccctccagaatataacgcctgatttcaccttatcagcgggcgcgattttggaggctccaacgattcccgttacactcgctgagggtgcggcccagccgttcactgtgctggcggaggatggccagaccagaaaaacctattatgtcacggttacgcttggcgacgtagatccggcaggcgcaaagcttgatacttcgaccatagtcctgcaagacgccaatcagcgcaatcttgatattctggacaaggccgtcacagtgaaagaggacggcgaggacattttgctgacggtcagcagcggcatcgatgtgacaaagctgcgtgttatcgctaacatctcgtatcgcgcaagtgcctcgcctgtcttggatggctctgtgaatcttgacctctcagattggacggagtttaccattacctctgcggatggcaaaaaccacgctgcttatcgaatcaaggtgcaagcgaaaacggtagcctccatcacagcattttcgctgacgatcaatggcaaggtttacgacggagtcattgacaacgtaagcggcacgatctccgtgactggggtggacgacagcaatctgaccactacaaaatttgcgccggacatcacactgggtgctggcacaacggtgtgcagcccgctatccggaactgaacaggacttctccgcaccggtcacctatacggtcacaggccgcgatgtagagagccgtacttatacggttcgggtaacgaacacggcaggcagcttgatctctgcctccggagagacgccaacaccgtccagctctgccaggatcgagaagttcacggtactgggtgtagacggtgagatcgatcacaccgctggtacgattgaggtcgtactgccgaacgggacggacgtaaccgcggtagcacctgtggtcactgtacctgctggcgcagtggtaagccctgtgtccggtgaagtggtgaatctgtccacaccgcttacctataccgtgaggcttggcagcgaggcgcgatactatgttgttcgcgtggtgtatcagcgcagtacctcgcagcagctttgggacaaggtctctgaagataatacggtaaccgatcatcaggagagccgcagcacacaccggttctcgtaaggaaggtcagaccgatgacggagaatatattcactattacaaaaataaaggtgggaaatcaatgaaaaaaagattcattcccctattggcacttttactgtcgctatgcattattgtgcctgtatctatcgcgcaaataatggcggcaggtgcagttcagatcaatgttaccgccaaaggcggcagtgtagaaattgacggtcataccgtagccggtggcggcaaccatagtgttaaggaaaatacaaatgtcactataaaggcagttccgcaggacggttatgtgtttgactgctggtctgtgaccggaggatcaatagccgcagaagatctcaaaaaaaatccggcaacattaagtgtaacgaccggagctgttgcccttaccgcgaactttgttaaaaccgtaaccatcacggtggcaagcagcaacgatgcatggggtacagttaccgcaagcgcggggaatgcggtacccggtggagcaggtattacgctgacagccgagccgaaggaaggctaccgactggatggctggacggtctcttacaccaacggcgatcctatggttgattacagcagccgggtcaatatctacacactgaccaaaggcgaaggcaacacggcaacactggctataagcgaaacgaacaccgaggcgaaggctctgactgtaacggcgcattttgaaaaggcagatgccgggcacttccttagttacgattactgtgagctgcagccgctggttttcgatcttctccctggcaacaagaaggcagcaagcatcacagggtggtcgaacgatgcgagtgaagacattgtagtgaaatttaatgaactcggcagtgacaacaaggtcacagccttgcgcggctacacgatatggggtggcctcaagcgtgtggctgatgacgtgacgtttaagtttgacaacgcgaatgcaacgaactactcgaagggttcgggcatggttggccagaggcttgcaatcgacgagactgcttacgcggtaggcttcacaatgaccgacaaagatgggaaagtgaagcatggtactgtcttgctgcagttccccggtcgtgcgctggtggaggcggatcatggtacggtgcagtatggcgaaaagacatacaataacggcgatgtgatcacgttcacaccgggcggctccgagaccatttctgcgacagcagcagacgggtaccgtctgaaggaatgggtcattgatggagctacgcttgcgagctcggaggatggctccgcgaccttcaccgttcccgacaagttcttctctatcaagcccgtctttgaggaaactcaggctgccgtaaccatcacggcggcaagcagcaacgatgcatggggtacagttaccgcaagcgcggggaatgcggtacccggtggagcaggtattacgctgacagccgagccgaaggaaggctaccgactggatggctggacggtctcttacaccaacggcgatcctatggttgattacagcagccgggtcaatatctacacactgaccaaaggcgaaggcaacacggcaacactggctataagcgaaacgaacaccgaggcgaaggctctgactgtaacggcgcattttgaaaaggcagatgccgggcacttccttagttacgattactgtgagctgcagccgctggttttcgatcttctccctggcaacaagaaggcagcaagcatcacagggtggtcgaacgatgcgagtgaagacattgtagtgaaatttaatgaactcggcagtgacaacaaggtcacagccttgcgcggctacacgatatggggtggcctcaagcgtgtggctgatgacgtgacgtttaagtttgacaacgcgaatgcaacgaactactcgaagggttcgggcatggttggccagaggcttgcaatcgacgagactgcttacgcggtaggcttcacaatgaccgacaaagatgggaaagtgaagcatggtactgtcttgctgcagttccccggtcgtgcgctggtggaggcggatcatggtacggtgcagtatggcgaaaagacatacaataacggcgatgtgatcacgttcacaccgggcggctccgagaccatttctgcgacagcagcagacgggtaccgtctgaaggaatgggtcattgatggagctacgcttgcgagctcggaggatggctccgcgaccttcaccgttcccaacaagttcttctctatcaagcctgtctttgaaaagaccggagatactccacagggccctggctgtgccacggtggatgcagagcatggcaagctggtgtataacgacagggaatacaagaacggcgacgtgatcgtctttactcccggcgaaacagtgactgtatttgccagagtagacgagggctattatctggacagatggaacattctagacgcaactgtagaaagcgaaaatgtttataaggattctgtgacattcgtcgttcctgacgcagccttcactattaagcccatctttgaaagcaaggaaggaaaagtagagctgaatttccatgcctttaacacgggaacggatgaagaccgccccaacgcctatggctcgaaaggttggtatgagaaacttaatatttatcccttccagttctacacatttgatgcccaagatctcacgatcgatgaagcaattgcaaagaagaaccggggtgaactagataatctttataaagcaggctacactgggttaatggcaaaatggccgctttatattgaacagggaaccggcgtccttgtcgcggcgaatacatatccggcatttcctgcgggcgttgacagcaaagcaacctatatctgcgaagacctgacatcgacagctacaaataagctgggagatctggttcgctatgaggattcccagtacagaatacagaacagcagactgtatatcgcttttattgcgaacgaggatgtcaccgttaacgcaaagttccacgagcttggttattattcgttcaaggctgtatccaacgatgaaaccatgggaaccgtagaaattaccccggaatgccttgcgggtggaacgcagcaagaggcaacgcatgtagtcatgcgagcgataccgagggatggttacagatttaagcagtggatcgaagctgatggcagcacatatctgtcagcagaacagaaaatgatttcgatagctcagtttgtgtttggaaccaaggcggcatcctttacagctgtgtttgaggagattacagattctcagccgctgccgattcaagcaacgtccgaccccgaaggtaaggcaaccattgaggtcaaggcgaatggaatggctattacctcggcaaaggagaacacatctgttgttgcgtccgttgcaaatgtggatgagtattatgaattcgaccactgggagatcacaacagctacagagaccgcagtgtcgcttatttctgaggaggactgcagaaacagtagtgttgagtttgctatgccgtccgtgacggagggtgtccgtataaaggcagtcctgaaggagcggtatgtaacactcagctgggaggtcatgaagggaggcggcagtggctatcaaggtgcttccgaccttgcaaatgtggagatatccgtaaatggttcgtcggtaagcaactataccaaggtcaagaaagacgatgtgataagcttttcagtgaccgtcaatgacactgataagtatgtgttcgaaaaagttggaaaacgagttttccgcaccggtagcgctcgcatagaagaaacctttacagaatattccggcacttttaaactcacagagtggacgagtattagtttgctcgtgtgtttgaatgacaagaccgaggaaactgcccggcatgacatcatgctgacaaaggcgacaggcggtacgatcacatcttccaactcgactgcacagccgaacacgaccgtcacgctgaccgctgctcccgatagcggctacacgctgaagagctggatcgtgaaggacgaacagcagaagagcattgctgtcaccgaagataagactaacagcaatgttggtactttcacgatgcctaagagcaatgtcacggtaacggcagagtttgagtccacgtcggagattacaccgacgatcacatctgtcgcactgctgcagggtaaggccggtaataaactggcaacgggcgttctgtccggcgacaagtggacgatcaccattcccgataccgtgtcggcagagacggttgagctgatccccgaaggcacgtccggcctgtttctgaaaatcgtgacgcccaccggcgtaacagtaaagcagatggacggcggcggcagctgggcaggcgactggtctaagggtgacattgtgtgctggatgccggtaggcgaagaagttactttccgggtaattgcaggaacggccaccaaggactatacgattaagttggtctattccggttctccgttactgtccgatggctccgccacccgcagcagcaagaccgccgcaacggtgacgttcacctccaatgtggcaggcacctactactataaggtagtggatcacgatgcagcggctcccacggtggatgaaatcaagaaatctaccacccatggtacagccagcgcgggtgagacgaccttcaccatcagcaatctgaccggggatgcccgtgatgtctacatcgtggtcgtggcagccagcggcgagagtgcacccctgaagatcgggatccccgcttacgaaccaaatcccggtaagtacaccattacagtgaacacccccaagggcggtaccatcatccccaaccgcaccagcgccaatgagggcgatgagatcatcgttaccgtaacgcccgatgatggttatcagatggtggaaggctctctgacctacacgctggcgatagaaaacggtaagacggtgaagatcaccaacaaccgctttaccatgcccgaaggtaatgtgaccatcagttgtcagtgggggacagccgcgacgaccgccaagggcatcaccagcttctccatcaacggcgtggccggtgcggtgaacaataccaccaataccatcaccatcaccatgccccgcggcacagatgtgacgaagctgaccccggttatcgccacaaacggcgtcaagtctctgacgcccggtaacggcgtaacggtggacttcaccaatgccgtgacctacaccgccgtcatggaggatggcagcagcaagacctatactgtcacggtttacgtggacaaggggacgctggccgatcagttctgggacaagctgacggactttgccacccaagttccctggtggcagtatgccgaaaaacagcagagcaccagcaagtatcccaagtattggtaagtagatggctcccgaccccacagacaccctgaaataccaatcgcaaaacgaacaaaagagcagccattcctaggaatggctgctctttctctgtaatgactcaggcacgggcgtgatgggcgttggcctccccgtgtgcctgaaccccgcctacccccacggcatgacactatggggctctgaaggggctgagtgcgcctgcgaaggcaattgctatacgccgcgcgactcacgaaacgtaaatacgcatttgatgtgtcagagcagggatgccagttaagcattgagccagttgtcgagaataggccgcaccggttgaataaatgaaggaagaccacttgccgaaaacagcaggtagccttcccttagatagagagtgatttccttggaatttgtccttccgaacgtattgacaatatactcgattatgctacgctgggattagggggttaggtgcgggcgaggagcagtgtccctgcctgagctttgtctgcgaaagctgctgtggttactgcggagctacagtggatgtggagtccgagttgcttacttgctcaggtcgccttgcgagtcccaaatcaccatcggtgtattcgtcaaggatagtagatatttcatcatcaatacgtatgactgtcagcgaaacatagtgcagcttcgctcgccaatcttgcctgcgcaaagtatgcttcaactcctcaaatgccttttcgctgttcaggatgatgatcgtgtgaatccttgggatattcttatcgttctgcaaaccgaggatcacatctgaagcaagtatgtcgtgcccggtaaagtagtagaaaaaccatccttcatcgcctttttcgttgactaaaaaatgatgcatgttctcatagttcgtatctagaccgcggctacgcggagagtgttttgacgaatatggcatgaggagggttgtttcaaatatcttgtctataaaagatatgatgcgagtgccgtagtagagtagctgccaactctgaatcagttcgattacttcgcgtgtgtctcttatatacttcgccaagtcaatgtccagccctaatctatatgcaaccagattccattcaggctttgacttaacgttctcggttcttaaaaatcgagaaaacaaactgggggatagctcatattttgttgcaatatccacctgcgataccttggggttctgttgtaaaaatacgttgattacatttttgactaagtttgtgtccctaggaaacctatctctgcttcctgtgagtgccattgtctttacatagtaaccttcgaattcgtacaggtcgtttgccttatttaccttttcgctcacatgaacacctcccgtcattaaataatagtaccatttgaataaaaaaaagtcaagcatgcggcttgataaataaatctgttgagataacgcgcctgtgtttagacgattgatgcactaatataaatggttatgtttatttttttgaaccatactgttgacttttgtaaatatatatgttaatctaaaagtgcaaaaagtcgcggcggcacagcggggttcacgacttttgagaaatctagacttctaggattgatgcaaaaaaagaagggaggcgaattattacccaggatgcggcatacagtacgggtcggctcgcccggaatcaacgcctgtggagacggatttctgtcgttgaagcaggaagctactctgtagcagggccatataaaaaggctgcccccatttgcagatgggggcagccatccaagcacaccgtggtagggtccatgatgcacctgtaggacaatatgtattgtatcatgaatcctccgcaaaatcaacaacacagttttaaggaggaaaagatggggatgttactttcacgcgccgaggcggcagcgtatcttggcatcagcgcaaaattgctcgacggtttccgcaaggatggcaaaatctcttatgttcagcgggttcccggcggcaaggtctttctcagcaaggaggaattgcgtcagttcagggcaatgtacacgcgccctgtgccccgcgcatccaccgcctttgctcccgcttttcgcggcgaggtacctgaacgagggtgtcgctgatgggacgcagcaaaaaacctaaatatggcactgtcactcgcaagggaagaaagtattttcgaacacgcattaccattcaggacgggacacgagttacgctctacggccgcaccgagagtgaagtagatcaaaaggtcgcagaattgcgggcaaaagtcgcgcgagaagctcttgaacgggactgccccactgttgcgcaatatgcacagctgtgtctagagaacagatccccgtttatcgcactcagcacatttgacaattatgcacaaactatcaaaaaacatatcgtagagccgctgggcgacaaactcatgtgtgacgtaacgcgcgatgacatactcgccgcagtgcgacgctctgccgtattgtcagagtctacttatggtgcggttcagatgttctacaaaagtatttttggcgaggctgtcaaaaacggaattatttcggaaaatcccgcacttgtccttcctgcaaagggtgggaaagcaccgacaaaggctagaaagtcgctgacagacgaggaagtgcagatccttttgaacgctgttaagggattgccgccgtacactttcattttgcttgcgctgtacactggactcaggcgggaggaaatccttgccttgcggtgggatagcgtggatcttgactcaaaaacgccctcacttactgtgcgcgaggcgtggcacgtccataagaatcgcccttatatcaccgaaagattgaagagtagggcggcttatcgaactgtacctatcccctcggaattggcgcaatacttgaaagagaaagagaatacggccaattccgagtacgtggtttgcaaccgcaatggcggcctgttgtcgggctcgcaatatagccgcctgtggaaatatgttaccacgcgcagtacgaagccgcgcgaatatacgcgcattgcgccagacggaaccaagacgaaacatcgggttgttcccactttgggcgaaagggctgcacacaacagtcatgtgatttattctattgactttcgcgttacaccgcacatgctgcggcacacgtatatcaccaatctgatttatgctggtgtcgatcccaagacggtgcagtacttagcggggcacgaaaactcgaagatcaccatggatatctacgctgaagccaagtacaacaagccggacgctctggcagcgcgtgtcaattacgcattcaacattcctaacctgtaatataaaaacaggcgattgcgaaaagatgggacaattgaggggacaatttttcccttataatccccaaatcccttgcaaatacaatggtttctatcgtgggagcgcaagaagtacggtctgaaggccgcccgtcgcgcacctcagttctccaagcgctgatcggacgcaaattcacaactcaaaagctcaaaaaccccggaaaatccgcattttccggggttttcttatgctcattttcataaaatatgactgattttctccattctttcctttgaccatcgaccgttttgcaaagcttattataccacgcaagcataaggcctatgttaagcaagaggtctttggggtgattggaacagcgaaagactggcttttactacccggttgacaaaacggaccacttcctctttgctgtacttgtcatagccctccacgacgacatgcatcaaaccgtttgacagatgggtatacatcatttccagctctgtctcactggctccgggcagttctttccgccagtaagcaatgctgtccgccttggccagggcaatcatccgcataaggacggttgcgtttgtattccccagaattagaattcgacacgccgtctgattctgatcgaccatatcgtagatggcttcgatcagagccgtcacatcaagcgaattgacatagcgaagggagttctcaaatgtatcgatgagctcattctcaatgctctccatcagggcaaagcaatcgctgtaatgggcatagaaggtggcacggttaagctgcgccagcgcgcaaacctccttcaccgtaattctgtttacaggtttttccttcagcagcttcagaaaagactgcttgagcaccatttgcgtatagcgtttccttgcatccatcttctccatatagagcccctccaaaaaagtttacaaagaaaagcaacgcttcgacagaaagtgttgcttttctttcagctgtatggcaagtgctgattgtttctgtctttctcctcaagtatactgtacttgtgaaagataatcaacacttgtatgcttatttgaggaggcttttttaatgtatgataaatatcttgttacaggtgccaccggcttccttggcagagctgttgtagaagcgctggtacgccgcggcacacgagtgtatgcgcttgtgctgcatgatgacccctatatcaatttgctccccaaagaagtccataccgtcatcggtgatgtgtgtgtgaaaaactcactgacagacttcttcgcggatgcggacagccgtacctgtgtgattcactgcgccggtatcgtctctgtcgcgtccagacccggttcgaagctctatcaggtcaatgtaggtgggacatggagcgttctccggcaatgtatggagcgtaatgtgggcaaaatggtctatgttagttccgtccatgccataccggaaaagccaaagggctgcaccattacggaggattgcgaattctccccggggcttgtggacggagattacgccaagagcaaggcaaccgcaacagagcttgtcttcaatgcggcagagcgcgggctgaatgccagcattgtcttcccctccggtatcatcgggccgggcgatatacagggagggagcttcacctcaatggcgaaatcctttcttgccgggaagctgccctttgccgtttgcggcggatatgacttcgtggatgtgcgggatgtggcaaaaggcattctcgcctgttccgaaaacggagagcccggcaaaggatacattttgtccggccactatgtcaccattcgcaagatgctccagctcgtggggaaggctgcaaagctgaagtatcgccccatctgcctgccactggggcttgcaaggctggcggctccatactatgaacgtcgaagcacgaaggagcgaaagccgctgtttttcaccccttattccgttgctgttcttgcctcaaacgggcaattcagtcatgctgcagcatcggaatgctttgcgtatcatccgcgcccgctggaggagaccttgcgggacatgacagcctggcttttggggcagaggagaacggacgaagtgtaacctcacctcaacaaaaagcacctttaggggcgcgggcaaatagccccgcgccccattcgctgtcttcccagaaaaagacggctgttcctcaaaagaacagccgtcccgtttttttctgctgatatgtatctgaaatcagaccacaaacaggtacaggagatatctacaagtctgtttgtcagcccatatcggcggatagagccttgctgatttgggcttgcagtgcctccgcctgcttcttttccgtgatcgcacccacgatggggtcgcccacgatgttgccgttcctgtcaaccacataggtggtgggataggcaaagatattggtggtgaactttcccgcctcaccgtcggaagcaaaatacacgttctgataggtcgcgcccttcttggcaagcacatctttggcctcggaaatggccgtctcgttgccgtccagcgtgaaggtgttgacgccgatgagggcgccgcccttctccgcaagctccttgttcagcgcgtccagctcggcaagctcccctacgcaggggttacaggtggtaaaccaaaaattcacaacggtgacggcgtttttggcgaacagctcgctgctcttcaccgtgttaccgtccagatccttgccctcaaaggcgggaaacttctgcatactgccatcgtcaggcggcgtggtcatatcgctgcccgccgggacgctcgtattgtcatcactatcaggcgtctctgacagccagggatacttcgtctccagctccgcccgctggttctcaatatccttgatcttggtggcctcgccggtgagcagcgtcagctcctcctcggtgaactgatccttggcgttctcgatggtcttgagcagaaaatcgccgtagttgccgccgtcctctatcatggccatgcccttatcggctgccataaagaccttttcccaaagagctgtgttttccgacaggatggcattttcctgcgccatcagctgctcgtacagcgcttttgcctcttcactgccatccttgccgtccgtgtcctccgcgggctttgtgccacaggcgaccataccggcggccagcaccagcgccagcagcagtgtgatgattttctttacgttcattttgtttcctccgtttttaatgtatttgcaggttctacagattcttttttgccgtctccaaagccgtagcggaaactgacggcgttggtgggacaggcgcggatgcacatcccacagcggatgcactcggtatggttgggcgtttttgtcacgtccacatccattttgcaggccttggcgcattttccgcaggagacgcatttgttcctatccaccttcatctggaacagggacaccctgttaaacagcgcgtaaaacgcacccagcgggcacagccacttgcagaagggccggtaaaatacgatactcagcacgatcactgccagcaggatgctgaatttccaggtaaacaggctgcccagcgccgcccggatgccggaattggcaagggacagtgggatggccccctccagcacgccctgggggcagagatacttacagaagaaggggtcacccatgcctacgtcgttgacgagaaacgccggcagcaggaagaccatcaccagcagcacggcgtacttgaggtacgtcaggggcttgagcttttttgttgagagcttcttcgtggggatcttatgcagcagctcctgaaaccagccgaagggacacaggaagccacagatgaagcgccccagcagtactcccagcagaatgagaaagccggtgatataataggagaagctgaacttggaggaccccaccaccgcctgaaacgccccgatgggacaggcgccggaggctgccgggcaggagtagcagttcagccccggcacgcagacggtcttgcccgcgccctgatacaagccgcccttgagaaagttcggcaggtgcaggttggtcaataaggccgcccctgcctgtatccagccccgaaaacgggccaaaagatgggacgcgcccgaagtattcttcttatccaa

SEQ ID NO: 536 - DNA, 14070 bp, unidentified
  source 1..14070: mol_type = unassigned DNA
atgaaagaagactggaaacccggaaccatgatttatccgctgcccgccgtactggtgagctgcggaagcactccggaggaatataacattctgactatcgcatggacggggacgatttgtacgaacccgcccatgtgctacatctccgtacgccccgaacgccactcctacgacatcatcaagcggaatatggaattcgtcatcaacctcaccacgaaagatatggcacgggccacggactggtgtggcgtacgctccggaaaggactacaacaaattcgaggaaatgcatctgacaccggggaaaagcaccgtagtcagcgcgcctcttatcgaggaatcaccgctttgcatagaatgccgggtaaaggagattatggctctcggttcgcacgacatgtttatagcggatgtggtaaatgtacgtgccgatacccgtaatctgaaccctgaaaccggcaaactggaactggcggaaacgaatcccttggtctatgtgcacggtggatattatgagctgggagaaaagataggcaaattcggatggtcagtagagaaaaagaagtaataatgcgataaaggttttaagagatggagttgcgacgaatcttgatgggcttatatctgttggccttccccgccatgatgtggggacagactccggttgtgcccggtactgccgacgaagagcattccggacaccgcaaggaaactccggtcaatttcggtttcaaaggcggtttcacctcttccttgttccttgtatcccagttcagtgtcaacggagtacccattgacgaagtgcagaacaattacaagataggatatttcggttcccttttcatgcggataaacttcgaccgccacttcctgcaaccggaaatatcctacaacatcaaccggtgcaacatcaccttcgagaaacctctgcccgaagacgccgcatcaggagcccggctggaggaagcctccattacatcgtccatccacagtatagacatccccgtcatctacggatacaacttcatcaaggaggggccgtacagccttgccgtctttggaggacccaaagtgcgctatatatgggacaggaaaagtgacatcgacttcgagaatttcgaccaggtgaatatccgtgaaaggctgcgtccgctcaatctcagtttcaccgtcggcgtatccgtcaccatctcacgcgtctttttcgacttccgttacgacatggggctgcacaacatctccaagagcgtgacatacgatattccggccgacaacaacgctgctgacgaaaacacgaaaaacgaaatccgttttcaccgcagggacaatgtgctgagtttttctttcggagtgttcttttgacagtaaatttcttccttttctttcaatttattcatttatttcccgtaaatttgtgcgcttaataagagaacacagatttatcaaacttatctaataagcagaatgaaaagagatgatttaattttcgaacttatcgaaaaagaacaccaacgtcagctcaaaggcattgaactgattgcatcagagaactttgtaagtgaccaggttatgcaggcaatgggctcctgcctcaccaacaagtatgctgaaggataccccggcaagcgttactatggtggttgtgaggtagtggaccagagtgagcagattgccatcgaccgcttgaaacagattttcggcgcagaatgggccaacgtacagccgcactccggtgcacaagccaatgcagccgtattcctcgccgtgctcaatccgggcgacaaattcatgggactgaaccttgcacacggcggtcacctctcccatggctcactggtcaacacttccggtattatctatactccctgcgaatacaatctgaaccaggaaaccggacgtgtggactatgaccagatggaagaagttgccctgcgcgagaaacccaaaatgattatcggcggcggttctgcttattcccgcgaatgggactacaagcgcatgcgcgaaatcgcggacaagataggtgccatcctaatgattgacatggctcatcctgccggactgattgcagccggtgaactggataaccccgtgaaatatgcccacatcgtgacctccactacccacaagactctgcgtggtcctcgcggtggcgttatcatgatgggtaaggacttccccaatccctggggcaagaaaactccgaagggagaaatcaagatgatgtcccagttgctggattcagccgtattccccggtatccaaggtggtccgctggaacatgtcatcgcagccaaagccgttgccttcggcgaaatcctgcaaccggaatggaaagaatatgccaagcaggtgaagaaaaacgccgctgtcttggcacaagccttgatagaccgtggcttcaccatcgtttccggcggtacggacaaccactccatgctggtagacctgcgcagcaaatatcccgatttgaccggtaaggttgccgagaaggcgttggtatctgccgacatcaccgtaaacaagaacatggttccgtttgacagccgctcggctttccagacttccggcatccgtctgggtactcctgccatcacaacccgtggtgccaaggaagacctgatgctcgaaattgccgagatgattgaaaccgttctgtccaacgtagacaacgaacaagtcatcgcagaggtacgtgcacacgtcaatgcgaagatgaaagaatacccgctgtttgcttattaataagcaaacagaattaaaaattaagaattaaaaattaaaggctgcgcagttcaaagcgaacattgcgcagcctttaatttttaattcttaatttttaattctaaacgcgctccgcgcgtttagctcagcccttctatatttccgtccacaatatcaatgtgttcggcttgtggtttcttgggtaatcccggcatacggagaatttcaccggcgatggctacaatcatttccgcaccgttattgaccacaatatccttgatgtggaactcaaagttgttgactgcaccgtatatcttcgggtcggcagagaaggagtactgcgtcttggcaatacagacggggtaatggctgatacccatctgctctatcagtttgataactttgcgggagtggagactgtaagtcactacgcttgccccgtagaggttgcaggctaccttttctattttacgttccacgcaatcgctctcttcgtaggtgaaggtcagcggttcggatggtttgttctcgatagtatctactaccagattggcaaggtcaacggctccctctcctcctttggcaaaggcgttgttcacggcaaaacctacctcaagcttttcttcgcaatggcggcggatagcttccacctcctcgtccgtatcactggcaaaacggttgaatgccacgatgacctgctggccgaatgaacgcaaattgcgtacatgcttgtccagattgccgaagccctctttcagtccttccatattgggttccttgatgcggtccagactgacaccgccatgcatcttcagtccttgtgcggtagcaacgattatcgtcagcttgggctgtaggccgctcttgcggcacttgatgttgtagaacttctccgcacccaggtcagccccgaaaccggcttccgtcactacataatcgccaaatgtcatggccatttttgtggcaagaatggagttgcaaccatgggcaatatttgcgaacggtcctccatgaacaaaagcagcagagccttcggtagtctgtaccaagttggggttgatagcatctttcaacagtacggtaatggcaccggctactcctaactccttcactgtgaaaggagtaccatcgaaacggaatcccagaataatattttcaatacggcgacggaggtcgtcgaggtctgttgccagacagagaatagccataatttcggaagccggggtaatatcgaagcccgactcctcggtaatgccgttggtgctcggtcccaatccggtgacaatgctccgcaaggaacggtcattcacatcaagtacgcgccgccagatgatttctttcagtccgaagccatccgcctgatgctggtacaagtaattgtcgagcaaagcggaaatcatgttgtgtgcggaggtaatggcgtgaaagtcgcccgtaaagtgcaggtttatcttctccatgggcagcacctgggcatatcctccaccggcagcaccgcctttcatgccgaagcaaggacctaacgagggttcgcgtaaagccacaatcgctttcttgccaatcttgttcagccccaatgccagcccgatggacacggttgttttaccgatacccgctttcgtagccgtgatagccgtcaccagtatcagattgctcttcttcactttctcttcatcaatcagatgcgtaggaatcttggctatgtaacggccatagttctctacttcgtcacgcgggatatccacactttcagccacctgctttatcttcttcagctctatgctgcgggctatttcaatgtccgatttcatacagagtcttttctttaaataacaactttaatgttttgaaagttgcaaaagtacgaaagatgtggcaaagtacaaaagaataccgtattttcacctgaccacctgcatcttctatctatttgaaccgcgacgtatccaccgcctcccgttgcttctccttatatccaccgaatttataagtaaacgatacgccgaattcgcggaagcatgagtaatgattcgtcacattctgcgtcttgaaacggatgcggggagaaatctgtcccgtctcaaaaatatcgttgcaatagaggttgagaatggctttgttcttggcgaagccgtagcgcagggcaatattcacattgcccgacgtaggcaggtcgtagatgccctgaatggctttactatgcacaaatccggtcaccgtcagcttcaagtcgggtttggtggagagagtaaaagtattgttcatctgggcaatgccatagcattgctttctgtcgaaaggaatatcccagaaatcaccatccttttcgcgatgccacaagccgatgagggtaaggcgagaattcaaccaatccttcaccttaaacgggatagaggcttgtatacctgcttgttgctgataatcaaaattgagtgtcttgtagatttcaaccagacgttcggaagattggtagagcgtctgtacggagtagtccttggtatggttgaaccaagcgctgaagatgtatttgctcttcaaaatataggtcattttaagctcatactcttgcgccggtttcagcaacggattaccatgcagctcagagtatccgccaccgatgtaagagacggcatcctgcaccgcccagtagtcgggatagtccttgtcgctgctcagagagagctgaaggatatgtcccggtgacggcatatagttcaagttgacgatgggataccagtcccactggttccagacgggagtcttgtaatgctccacagccagggaagcgtccaaagcgagtttgtcgccgaaactcttgctggaacctgcatagatattccaggtctgctcgcggcggcgggacttcatattgctcaaggcatccgatgaggtcagttgtccgccggtttcggggtcataataatattggtagctgttgtcgatgctggtagtatagatggctccgtaattcaaatcccaaccttttcccagactgtgctcctgggccagaaagaatttccatcggttgatacgttggcaatcttcggtgtagaagtcgagttcctcgtcctgcatgcggctatgcagcaactggtcggacggggaacggtagtaggtcagttcggcaccggctttgaggccgaaaggggtacgatagtccagacggccgttgtgcagccagtcggtgctattgccatgagttgtggacacctgcgtgcccgtcacgcccttccagttgtgggaggtggaatagccaccgttatagacgaaactcagctgatggtccttggcgatgttatagtccgcccctaccctgaaattatgggtatgactgcggccacggcccacctcatatgttgtcatggggtgaaccgagccgtctgccagggtgtgcacagcctctttgtcggtagtagagtagccccggccatggctgtgcgagtaaagaaaatctgctgagaatttatttttgctgaagagcaggctggcgcgttcctcaaagccttcgttatgcttctggcgatacttggcatagagttcgccttgccaggagccggggccgcctaccgattgtttcaaggtgatattgataagtgcgccacgcacctggtagcgtgcaggggcgttgtacatcacttccgccttctctatgcggctggcagggatgctgcgcagcaaggaatagagctgctctgtgctgagggtggttactttgccgtccaggataacggtgactccctgacctgccaactgcagccctccattcatctcgatgacgccgggaagctctttcacggcatcgtaggcattgtctacggggaggttctggataaggcggggcaggtcgtacaccagcttgccttgcgctgccttaacgatggggcgttcaccggtaatcatcacttccggcaaggtctgataaagactgtccagacgggcatcggtcgtgataaggctgtcggcgctgaggatgcggttgtcgtccgcaccggaggtggttgcagtgccgttgttctcttgtgccgaaaggctgatgctcaaagcacagcatacaatagggagtaaatagaatcgtttcatgtccttctttttatttatgtttatattcttcttctgcaaatcttcgtctgcaaagtacggcagaatcagcagaaacttgtgttatcagcggcttaccaagtgttatccagtgttatcgggagtgttatttagtcttatcggatgatagggttcacaatattaatcttacctttgtatgtataaaagtaaccggaaacaaacatgaaactgccattcaaatatattgccatacttgtcatcgtctccctggccggcatcttcgcctaccaagcctactggctgacggggctctaccataccatgcacagtgaaatggaaagggacatcaccgaagccatgcgcatgagcgactataacgaaatgatgatacgcgtggataaaatgaagcaggacgacataaaccacggtgaagtcagcgtatcagccggatacagcgatgacggaaaatcatttgtccgtagcagtaccaccatctcccgtgaagattctttggacaacaccaccctgcacgaaaccttcatgcccaaaggagacagtgtttacgtgacccacccgaacgattcaacccgcgtggaagtcagtgtcagggactcagacagctctccccaatccgcattgagtgccaaagggggactggatgtgattttgcgcgaccaaaacagtatgctggaactcgccacctacttccagcgcggactgcattcgggactggacatcatttccgaccccgacgtactgctttatgacagcctgctgacttcattcctgcatgaccgtaacatcaatcttccccataggctgctacatcttcacaaaggcagcaaatgggactctaccattctctatatagatacattggtaaacatcggtacccccggctatgtgcctacctcaaaagccgtggaatataattattctttcgacatcaatacaagtcaaagctaccgtctcatcatggaaccggccggcacgttggtcttgcgacagatgtcgggcattctcaccacatcattcgttattctgatcgtactcgctttctccttctggttcctgatacgcaccatcctgaaacagaagacactggaagagatgaagagcgatttcaccaacaacatcacccacgaactgaaaacccccatcgccgtagcatatgccgccaacgacgctctgctcaacttcaaccaagcggaggaaaaggcccaacgcgacaaatacctgcgtatctgccaggaacagcttcagcgcctcagtggactggttgaacagatactttccatgagtatggaacgccgcaggactttccgcctgcacccggaggagtttgcaatacgtgatattctggaaacgctcatcgaacaacacaagctgaaagcggaaagctccgtccacatatcggtggacatcgaaccggaagatttgagcgtacttgccgaccgtacgcatttcagcaacatcatcagcaacctgatagacaacgccatcaaatattcgcacggagaagccgaagtggccatccattgccgcaaggtaaccgtcgaagggcagaatgaacagaccgaaatctccgtcagcgaccacggtatcggtattgctcccgagaagcagaagcacatcttcgacaaattctaccgcgtacccacgggtaatctgcacgatgtgaaaggctatgggctgggattgttctatgtgaagaccatgatagagaagcatggtggcagcgtatcggtaaagagtgagttgggaaaaggaagtacctttacgataaggatatgataacattatttgttagggtactttacattacttgttaaggagctttacattacttgtaacaaaagcgacaattatggaaaagataaccgtacttctggttgaggacgaacagaccctcgccatgattatcaaggacacattggaagggcagaacttcatcatccacaccgcagcagacggtgaagagggattgcgcaagttcttcgacctccgtcccgacgtgctggtggcagacgtgatgatgccccgcatggacggctttgaaatggtgcgccgcatccggcagaccgacaaacagaccccggtactgttccttaccgcccgctccaccatcaacgatgtggtggaagggtttgagctgggtgccaacgactacctgaaaaagcctttcggaatgcaggaactcattatccgcataaaggccctggtaggcaaagctttctcctttacagaggaaaagcccaaagaaactaccgtttttgaaatcggtgactaccgtttcaattccgtcactcaacgacttgcttttgcaggcaccctgacttcacctaacgcggatacggaagtggaactctcccaccgcgagtccgagatactgaaacgtctttgcgagaaccgtaaccaggtggtcaacacccagaatgtattgctcgacctctggggagacgacagcttcttcaactcccgcagcctgcatgtgttcatcaccaaactgcggcataaactggccggagacgagcgcatccgtatcgtcaatgtgcggggaataggatataaactaatagtgaactaaactaaaactaaactactatttatgaaaaagttattattcattacttttatctgttcctcactctgcgcctatgcacagagcgagattccggaagacacaataaagaaccggcctcccgtaaagaaagagcagattcccttttctccaaaagagaacaagcgtacgggccttgatgaaagccagccccaacaaagtctgcaaggcgaacagcaggaagagataaatctccatctccctccctccgactatgtggagcccctgccctggacggacatgaagaagatacactttcagaaaaacatctttgaatgggacttccagcgtttcgccgatttcctgctctcgccggaagtcgtactgacgatgtacggcagccataacacctatcctgcaatgggctccatcatgcaggctggcgcaggagtcacttattacagtcccgacggacattgggaattgagcggaggggtatatgccgcccactattccatctcccaaccttcatccattaccggtgcccagtatgccaaaagggatgccccccgaggtactcaatgggacataggctacaatgcctccgtatcctaccgcatcaatccctacatgcgcctgcatgccttcggccagtattcgggctacgggagaagtaactcctttcatggatatatgaacccgatgtatccgcaaagcggttatggcatggtactggaactgaaagtgacggactggctcgacctcaacggagggatggaacgaagatacgaccccaccaaaatgaaatgggtaaattcgcccattttcgcccctaccattcgtataaagaaatagaaataatacaaagatatttccggaaatagagggaaacgagtatctttgttcagtctgcccctatgcggcagacagcaactgaaattgtgaacaaagaactatgaaacgaatcttcttctgcatcatcattttacttgcaggcatgtcatccgtcagcgcacagagcgagatgcctgccgatacggtacgtactgcagtacgtggcgaagcgtctcccgaaggcatgtctccgtctgaaaaggagcttctgccgggcgtgaagaattacgacggcttcctgctggatatggggctgatgaatctgtccacccccactcttcccaaattcactttggagataccggatgccagcaaagactatagccgcatcttccagttgaacccgaacgtgacttattcacaaggtctttcgaacatattctcactcagcaactcccggtatttcagttcgaatcccttcggactgacgggcttctggggctctaccgacaacctgcaaatgggaagtttcactttgaagaacggcatgcgcatccatacgtacggcgaatatgacaaggacggctggaaagtacccaacccttccgcactgccttgggaaaagaacaatttcaaaggggcgttcgagctgaaatcagccaacggagcctttggcatacgcatcgaggtacagcagggcagacacgtgccctattgatgcccatcacttaacaacagaatcaatgacaagaaagaaaatactggtaataggcgccaacggttttaccggcagacgcatcctggatgatttgtcccacaacgtgttttatcagacaacgggctgttccctgcacgacgacatctgtccccattcgggcgactatcgctttatccgtacggatatatgcaaccgccaggcggtgaaaaagcttttccaggaagtacagccggatgttgtaatcaatacctccgccctctccgtccccgattattgcgaaacgcaccatgcagaagcggatgccgtcaacattactgccgtggagcatctggcagaatgctgtgaggcgggaggcagccgttttatccatctttccaccgacttcgttttcggtggtgatacggaccgaccctatacggaggaggatattcccgctcccgttaattattacggctacaccaaactggaaggtgagaaacgtatcgctgccgtttgcagggattatgccatcgtgcgcgtagtggtggtgtacggtgccgccctgcccggacagcatggaaatgtgctccaactggtggcaaacagattaaggaacaatgaggaagtgttcgtcgtatccgaccaatggcgtacgcccaccttcgtgggagacgtgtcgcaaggagtggagaagctgataagtcatccgcaaaacggtatctatcatctctgtggcagcgagtgcctgaccattgcagacatcgcttatcgggtagcggacgtattggggctgaatcgctcgctcatccgtcccgtcaccacgaaggaaatgaacgaaaagacaccacgtccccgtttcagcgggctgagtatagaaaaggcacaccgggaactggggtatcaaccgtatacgctggaggaaggaataaagctgatgttcggatggtaaataatgcaggtgcggatggcaggagattcgactacagcaactccggctctgccagtcctttctctttgcgatacacacgtaccatctccagaatcacatctccatatttctccacccctttttttccgaaatacggaatgcgtacaagcatggccttatccgaaggaagcagattgctgatgcctagaattgccttctgctgaatgacggtgtatacgggcagccctaatgcggaagcttctgcattgcgccatgctaccaagcggttgtaaagttccggatgcagcacatccgtgggtacttcaacagccgcagcatcgcgtttccgctcacgcggacgtttctctttatcagcctgcttactgcttccctgcccttctttggcagaagcacttctccctttgcctttacccttctgcgaagccgaatcatcaatggaaagcagtgctttctgcttcaagtatcctgccatatggaaaccattctccagcacataatccagcaaatcagtcttcatgtcaaacacttcctccagttcctccatggcatcccggagcttcttcttcaactctttattatcagaagttaccgtactcgccatcaccgcatccagcggttgcaactgctcttgaaaataagtggcggcagagtgtatgcgcccctgcaaagtcgggtcggctgcatagtcctgcgcagtatcaatcaggcgggtatactggatactgaacttctgggctactttcgtcactttgtcgtgaaaacgttccatttcctccttgcaggctgcgagttgcttgggaaagagcttgtacaagtgttcgtctatcagccgcacataccgccgcaaagcctgctccatgggctggaaatcgaacaagcccgacagcagttccaggaaataggtctgctgcaaggaacggaagcgtttctcgtccggctcgtttctccgtgcctccatcgtgaaggtatctactgcatggtcactgataacggcctttgcagaaagcggggcactgagcaccactccctccaatgtcttgcagcggctcagagccacataggtctgcccatgcgcaaaggaggcaccggcatcaatcacggcacgttcaaacgtcagtccctggcttttgtgaatggtaatcgcccacgccagcttcagcggatattgccggaatgttccttcaatatcttctgtaatctccttggtttcctcatcaagcacgtatttggcattcgtccactcttcctcctgaagtaagaaggtagcgtcgcttcccttactgcgcacttcaattccatctgccgacacggctgtcacctctccaatcatgccattgtagtaacggtgctcaccggaggtgtcgttcttcacaaacattacctgggcaccgcgtttcagttccagtacttcatccgtgggataggaatattcgggaaactttccgtcaatcttggcacgaaaggcatacgagcgtcccggaagttgttccagctcatggtcattaatccgttgggcctgataattgtgggtcaccaggcggatgtatccttcttctttatctggtacgaaattgggaatataccggcggttcaaggcttccagcacttgcccgtcacaacggttttcgcgaatgcggttcagtaattcaagaaaagtcccatcgttctgccgatagactttctttagttctatggtgcaatattccgtctgcttcaaggcctggctggagaagaaataaggcgtgtcatagtatttgcgcagcatctgccactcatcgtctttcactacgggagacagctgctgtaagtcgccaatcatcagcagttgcacgccgccaaagggtttgttccggtcgcggaaccgcctcaagacggcatccaccgaatcgagcaagtcggcacggaccatactgatttcatcgatgaccaataaatctatgctgcgtataatgttgattttctctttcccgtaacgaaaacggtaggttgccttgccatctgcgctgaatgagctttcgggcacataaggagcgaaaggtacttggaaaaaggagtggatggtgacaccgcctgcattgatagcggcaattcccgtcggtgcaagtacaatcatccgtttcggactctccgccctcagttttcgcaggaaagttgtcttaccggtacctgccttgccggtcaaaaaaagatgagtgcctgtgttttcaatgaattgccatgcaagcgctatttcgggattattctccat

SEQ ID NO: 537 - DNA, 6400 bp, unidentified
  source 1..6400: mol_type = unassigned DNA
tcaatcttcgatcaatccttttttcttccatgctccgctccgccagcgcaacatcatgccgaccgcacggctgcattcatctgctgtcagaccgatataagcacccactactgccagatgcagttgtatccccagcagatacgttcctcccgctgcacacaaaaacatgaaaatagctccgaggatcaccggaaatacagcatctccactggttttcagtgcatttccgtataccaaatttgttactcgtccggcttccagggcaatatcaataaacatcagcttctgcactagttctaccatactcttatcctgcgtgaaaaaagagatcaggaccggggcactgactgcaaacagaaattctgttcccatcgccagtaccgctccgatcgccgcagattttttagtctgcttatcacatatttcatattttcccgcacccatgtaccatccggtcataatggcattcgcctgggcaagtgcacttcccacacagaaggataaattcgtgatctgtgccgtataggagcgggcagccacattgattccttctgtatccatctggttcagaaaacggatcaccagtgtcatcgctacattataaataatattctccaaagcggaaggtaatccgatccggatgatcttccgcaaaatctctccggaatttaccctctccgaatatttttttgcagggatcagccgccgtacaaagatcactatcaatatcagattcactactttagagatcactgttgcggatgcaaccccctgcacgccgaggtggaatcgaaacagaaacacggcatttaatataaagttcaaaatattacctgtcacagttgcgatcagaggctgtttcgtatatccaaatgcacgcagatatcctgccaatatgggaatcatagcgttcagtatacttccgcctccgacgatccgcaggtattgtacggcaggctccttcaatgccggtgcaatacctaccacatacagaatcccatcggaacagaaaaacaaaaacacagacattacaacacccaggatcccattaaaccataatcccaaagtctttgcctgacaggcgatccccggtctgcccgcaccgatattctgtgtcatcacagccagcattcccatagaaactaccgaatacataataatgaatacaccgatataagtatttgctgttccgactgctccgactgcctgatctcccacagaagaaagcattaaggtatccaccattccggacaacatgtaaaagatcgtctccagacacagtggtacaaataattgaaataatgacttattctgtccttccatcgtaggttttatatcctttctgcggttcctaaaaatttgcattttcattttacaactattcagaatactattccgaatagtctcttcaatttttacatattactactttatctttcctaaaacttgcatttttaccacagaaaattgacttatttctacttttatagtaatctgaccataatatcctctgctccactccacagaaaggcctgcctatgtaccctgaattaagagaagaacgcattcacggaacaaaagaatttccttttagctgttatcacctgcatgatatgcctgctttttttcagattcctgtccactggcatccggaggtcgagatcatatatgtccgctccggctctcttaatgtcatcattgaaggggaagaatacgaagcggccggcggctccgtattctttgtgaatcccggtgagcttcattttatgggttccgcaattccgggcgtagactatcataccctgctgtttccactggaatttatttcctttcagacggacgatctgttggaaacggagtttctccttcccctgcgtaaccatgaattgcttttgcatcataatctttcccacgaaaaaagctgtcctgacatcatttctctcatccgtgagatcctgtctgtcagacagcttccaaatacattgaacgggcatttccgattacgtattttattgttgtcacttatccaaaaaattgcttcctgcggaaccattaacccaatgggctccaaaaggaacgatccgatgcagcgtgagatactgacttatctgcagtataactacacggaaccccttcgattggaaaccctggcagagcaatttcatttatccgaaaaatatttgtcccgctattttaagcagcattttcatctgactctgacgcaatacctgatgcatctgaggctgacccatgcctgccatctgttagagagcacctctctgccggttacagaggttgccctgcagtccggcttccccaacgtgagtcattttatccgctgctttcacaggacatatcagatatctccgctgcaatatcgcaaacaactgccctatcaatgatcgttttcaagagctcttctggcaagctccaggcatcccatgataccctgatcatcgtggagagatgccggcaccacataatgctccatgtctgcaagttcatccgttacgatatagccattgatgtattccttaagtttcttgcggatgagggggaataactgctcctgatgcatgacaccaccgcctaaaatgatcatttccggagataccgtcatgacatagccggtcagtgcctgagcaatgtaatctgcctccagctcccatacttccgggcaatctgccaggtccactgctttcctgccccagcgttcttcgatggcagggcctgctgccagaccttccagacaattcttatgataaggacatcttccggcataagtatctgcggtccgcttcgtgatcaacacatgtcctgtctccggatggagcattccgtgatgcaactctccattactataaataccaccgccgacacccgtaccgatggtcagatacatgacgcactttttcccttgtgcctgtccgaaagttacttcgccgaggacggaaccattcacatccgtatcaaatcccacggggcaatgaagtgcctcctgcatctgccccacaatatcgcagtccctccaggccagctttggcgtggttgtgatataaccgtatttttcggaacctctgtccagctcaatgggtccaaaacaggcaattcccaatgcatcgatccccttgtccctaaaataagcgatcatcttaggaatcgtctccttaggcgtagttgtaggaatcgatacctgttcataaattgtaccgttctcatccccaatagcgcagaccatttttgtaccgccggcttccaatgcacccagacgtaattttgccatataaactccctgcctttccagattctgtctgtcaaatatatcccgagcttttccttcggattctgctctctgtggttagtatagcaaatccttttctccctgttaatatcaatttttatagagtttctctctctttttaattttctcttttccggggaatctttcctatgatatacttgttatactgttctcagttacacacaaattgcaggaggttatatcacaatgaaaaaaatatggatcgtcggttccctcggtcacatggggcaggcgttgatcaggttgttagacatgatggaatatgaattatacgaaaccgataaggacgagctggatatcacggatgaacatgcagtttccctgttcatgcaccgcaatcgtcccgatgtcgtcatcaactgtgcaggatatcatccttccgccggtgcagcgcagtcggagacagatatggcttacaaggtaaacgccgtaggtgcgaggaatctggcgcagtctgcggagagcattcaggcaaaactcatacagatctctacggatgatgtattttccagcgcatccgacacaccctataatgagttcgatgatgtaaatcccgtaggactgtttgcaaaatccaaatacgccggagagaaattcgtcatccagctgatgacccgctatgtcattatccgcagttcctggatctatggcatcggcaaagactttttgaatgaagtactcgaagctgccgtggaccctcaggtatccacaatggaattgctaaataacgaccgtgcggtacctacctccgctgcagagcttgcacgcgtggtaaaatttttcatcgacaacgaccattacggtatctatcacgccgtatgcagcggcggttcctgcacacgcctggaattcgcgaaagagatcctgcgtcttgccggaaaagaggaccggcttaccgtcacagtaaaagacggcaccccggagaaatattccgtactggataatatgatgctgcgtcttaccggcatcgaagaacccagtggctggagagagacactggcttcctacatgaaagaaaccggaggactggaatagtggaaaaacacaaagaagaaaagaaaaaactcggtttgtccaccaaaatctttatcgcccttttaaccggtgcggtatgtggtgtgctgattcattattatatgccggaagggtactttagagatacgattctgatcaacggtattctctatgtactgggcaacggttttatccgcctgatgcagatgctggtggttcctctggtattctgctccctggtctgcggtgccatggccatcggtgacacgaaaacgttgggaactgtgggtgtgaaaacgatcctgttctatctatgcaccactgctttggcgatctgcgtggcactgggtattgccagtctgatcaatcccggcgttggcttaaatattgcgttgccggaggatgccaccgaagtcgcgaccacccaggtagattttgcggagacgttgttgaatattattccgaaaaatatttttacctctctgtccgccggagatatgctgccgatcatcttctttgctttatttgtcggcattcttctggctgccatgggcaaccgggtctccactgtggcgaactttttcagtcagttcaatgacattatgatggaaatgacgattgcagtcatgaaagcagcccctgtcggtgtcttctgcctgattgccaagaccttcgcaggtatcggcttcgacgcttttgtgcctatgctgaaatatatgggaagcgtcattctggcactggcggtacagtgtttcgtggtatatcaggtcatgctgtttgtgttcacccggttgaatccttttaagttcattaaaaagttcttcccagttatgacctttgcgttctccacttccaccagtaatgcgacgatccctctgtctatcgacactctgtataaaaaaatcggtgtctccaaacagatttcgtcctttacgattcctctgggtgccaccattaacatggacggtacttccattatgcagggcgtagcagttgttttcatagcacaggcttacagtattcctctgaccccggctgccattgctactgtcattgccaccgcgacgatcgcctccatcggtactgccggtgtccccagtgtcggtctggtcaccctgtccatggtactgacctccgtgggactgcctaccgaaggcattgcactgatcatgggtatcgaccgtatcctggatatgctgcgtaccgctgtcaatatcaccggtgatgccatatgtaccactatcgtggctaagcagcagggtgcctttaatgagaatactttccgggcagataactgatcacctgtttacagctttccagatggctgtcaccgtataaaaaaagagtgaaacattctgtcttgtgctcaagtgcaccgtcagaagtttcacttttttatagctcgcagctattctatttcagtttattgagttttgcccggttggcaataacgatcagccgcatatcctgtgtcagaggttcttccggatcgatattggtatttacattttttccttcgatgatcgccaccacgttaatggaatattttttccgcagattcagctcgatcaggttcttcccgatccactgctgtttgacttccatttccaccatagacacatcctgggacaattcgataatgtccatgaaaccggagcttaacagatttttggccaggtggatccctgactcactctcggggaatactacacggtctgctcctactttcgtaaggatcttgcagtttatctcagtggcgcatttggcgataacggtctttacgcccagttctttacacagcatggttgccataacactggcttccagatgatttgccatggtcacaatgaccacatcaatattcgcaataccgatctgtctcaacgcttccggatctgtaacatctgcacatttacagtagggaatctctgagattgccgcattgacaactgcctctctattgtctaccgccaccacctctgcgccgttctctgccaactccttcgccacacttcttccatatcttccaagtccaaatactgcataggtctgattgattcccat

SEQ ID NO: 538 - DNA, 20072 bp, unidentified
  source 1..20072: mol_type = unassigned DNA
atgagtacccagcgctttgatatccgccacgcgcccgccccgcgggaatccttccgtctgctgtacatcagcaaaagcaaatttggcggcgattggaacagtaccacccacacccactcctgcacagagctgttctactgcctcagcggcgagggacagttctaccttgccgggcagctgttcccggtaaagccggacgatatggtcattgtgaacccgcaggtggagcataccgagcttagcctgaacgcctcgcccttggagtatatcgtgctgggcgttgccagcatggagtttttgttcagcaaggcggatacgaactacgccatcttcaattgccgggagaaccgggagcggatggtcacgttgctgcacatgctgctggccgaggccgaccgcagcttagacggctgcgagaccgtttgtcaggacctgctggaggtactgctgatctggctggtgcgctgcaccaccatttcgctgcagctggaggaggctgccccgaccgagaaccgggagtgcgccgagatcaagcggtatctggacaccaactaccgcgaggatatctcgctggacctgctggcagagcttgcccacctgaacaaatactatctggcccacaccttccagcgggagtacggaatttcccccattacttacctgaaccgccgccgcattgaggagagcaagcatatgttgggcaacaccggttacagtctggcgcagatcagcgagctgatgggcttttcctctcccagctatttctcccagtgcttccgcaaggcggagggcatgacccccaacgaataccgccgtcagacgcggcagggaaaacgccccgccccgacaaaacggcatgaagtataacgaaaacgaggaatttatgatgaaatccgttaccctttctctgctccagtctgctgcaaatgcctttgattttggcgggcctgtgctctgcgatgctcaccactatggtgaggggcatatcaacgacacctttgtggtctggcgggaagatcattccaaacgctttattttgcagcgcatcaacacagatacctttactaacccggtgggcctgatggagaatgtctgcggcgtgacccggcatctgcgggcgaaaattcttgccgagggcggcgacccagcacgggaaacgctgaatgtcatcccaactttgtcggggtcgacttgctatctggatgcagacggcggcgcatggcgtgcctacgactttgtagaagataccatctgtttgcagcaggtcggcagcgaaaccgacttccgcaccgtggccgagacactgggcaaattccagaaccagctggaggattacccggcctccaccctccacgaaaccatcgcccgcttccacgacacgcccaaccgctatgccaattttgaaaaagccctcgccgccgatgcactgggccgggcaaaaaatatcacgtcagaaatcgaatttatccatgcgagggagcaggactgccatgtcctgctggatcagctggcagctggcgaaattcctctgcgcgtcacccacaatgacaccaagatcaacaatgtcctcatcgatgctgctaccggaaaaggcatctgtgtcattgacctcgacaccgtgatgccgggactttcggcctacgacttcggcgattccatccgcaccggtgccaacgactgcgctgaggacgaacctgaccagagcaaagtccattttgacctgcatctgtacgaagtgttcgccaaagggtatctctccactgccggggcatccatgagcatggcagaaaaaaagagccttgcatggggtgcaaggctcatgacgctggaatgcggcatccgttttctgactgactatctggagggcgaccattatttccatattgctcgcccggatcacaacctcgaccgcgcccgcacccagttcacactggtgcggcagatggaagaggttttcgatcagatgctggaaatcgtctgcccggacaatcactgatttcgcaatctcctccattcggatacagcaagaagcatggacgctctccttttcgggggcgtccatgcttctttttacagcttatcgctatcgtctgtggcttttggcagggtgcgtccggggggacgcaccctgtttttttactatgcttcatcattttctgcgcgcagcatccggtatccgacaccaacatgggtctggatcagatgcggcgcatccgggtatcgttccaattttttgcgcagggatgccatgtaaactcgcaaggaagcaatgtcattttcctgcgtactgccccatactttctgcgtgagggaggtatgcgtcagcactttgcccacattatgcgccagcacacacagcagtttgtactcgatgggggtcaaatgcaattcattctcgctcagccagacgcagcctgccgagaagtcgatcttcaaaggaccattgacaaaaaccggactatttatgccgtcagaagccagcagattcaatcggcgctgcgttacacgcagtcttgccagcagctcatccacggaaaacggctttgtcagataatcgtctgcgccgttgtccagtgcctcgatcttatcagaatcttcgctccgggcactcaggacgatgatgggcaggttcgaccatgtgcggacgctgcggatgacctcgatgccgtctatatcgggcagcccaagatccagcagcataatgtccggattgtggctggtagtcatcatgatcgccgtttccccattggaagcagtcagatatttatagccgtgggttttcagggtcgttgtgatcagacaccgtacaggaacatcatcctctacgaccagaatggacggcttattcatgaatgttcacctcgctttgcggcaatgcaaaggaaaagacactgccattgggaatgttgtcacgcagggtcaatgttccgccgtgagccgtcaagatcgcacggcagaggggcaagcccagtccaaggctgcggtggctgtctgcaatgcggctctgcccggtataaaacatctcgaacacctgtgcttttgcgcgatccggaatgccgggaccgttatctgcaacgtccactacgacctgatgttctttccggtaagccgaaatctgaataaccgagcctacgggggtgtatttgatggcgttatccaccagattgacaacgacctgcatgatcagccgtgcatccacattgaccaagaggatctcgtccccatactgtgttgtgatggtatgttcgcagcttttccggttgacatgatgcagagcttcttcgatcatttcgtccatcagctgcggcgagatctgcagattcatccgcccatcctcaatgcgggtgatggaaagcagattttccaccagaccgatcagccattgcgcatcgtcaaaaatatcggtgcagatcttgttccgggtctctgtatccagcgtttctccgttggaaagcagattgctggcattgccggaaatggaggtcagcggggtgcgcaggtcatgggagatcgtgcgcagcaggtttgcccgcagctcttcattccttgcctgcaatgcagcttgctctttttccagcgcgtttctgcggttttcgatggccagcgcaccttcacccagaatggaaagcagcacgctgttttcaaaggcatccagcggtttttcggacagatcgattccgatcactccaaacacgccgcctccggtccgaagcgcaagataaagcccctttgcatccgggtagctatccgtgcctgcgccggaacgctttttgttggcaaacgtccagtttgctgcatcccgttcttccggtgcagaaaagatgttgcgcggcacttccccatcaatctcaaaaacctgttctgacccaagatctccgttttgttccgggtaaacgatcaagctccggttcagcagcttcatcaactgggacgctgtctgagagaggatttcttcctcgctttttgctctctgtaaaagctgatttgtatcaaacagtatttttgtacggaacgctgcctgcgcagacatttttgcatgatccttctgccgcgttgtcagggcgcaggtaatgattgcagaggtcagcatcagggcaaatgtaacctgataaccgggatcatacgcatggaatgtcaggtatggctcggtcatgaagaaattgtacaatgctacactggcaacggaccccagcacaccgcaggtgtagccgctggtagacaatgcggtgaacagcacccccagcatatagagcataataatattatagcgcgcaaagtccagttgcaagaaaaagaagccgatgagcgtgatgcagctcaggatgcctgcggtgatcagcagatcacggacagacggcagaagcgaacgggtgaacagcttttttcctgagccgtagccgttctctgcagaagcatccgggatgatataaatatccagattaggcgcagtcagcgtcaatttttcagtcagtgacggtccactccagaaatggcggcgatgtacgctggagcgccccagtacgatttttgtaatgccggagatgcgggcaaactctgcgatctgctgcggaatgtcatccccgtagatcgtagaaatgtcggcacctgcctgctctgccatacgaatgtgctgctgcaagcgccgacagtcttcttttcccatctgatccgagtcaggcgtccggacatacagagctgtaaaggtccctccaaacgcctttgccatcgttgctgccgtccgcacgatctttgcattggagggagaggacgacagacacgccagaatatgttcagtgggtgggtcgttctgattcataaagatcacctgccttgcccacagtatagcacaatttgatggttacgaccaccagccacgtctttttccttcctgtcgaaggatctcctgtcgtatgtgatccagcgcatctgctgcccggaaaccactcaacatgactccaagaaccatcaataacaaagcgacatccatacgatccgtcctatctttttagagccggaaacacttctggatcgatgcgtatttccccaaaaccagcatactttcatcccggcacagctgcgtatccggcgtaatgctcatatcgagctttccgtcttttttcagtgcaagaatgttgatgttatacttttttcgaatattgatctcgccgatcgtgcgattcatccattccggcggaatagtcacttccatgatggcgtggtcgtcctgcagctcgatataatcgagaatgtgttcggagctgtatcggatcgctgcccactttgccagctgcttttccgggtagaccacttcatccgcaccgttgcgcagcagaaacttggcttgtacatcccgctctgcacgcgagaccacaagctttgcgcccagctccttgagcagtgatgttgtttccaacgaactctgaaaattgccgccgatggttacgatacacacatcaaaattgccaacgccaagggaacgcagaaagtattcgctggtgctgtcaccgatctgtgcattcgtcacataggaaagcacagcgttcacacgatcctcattgctgtcgatcgccatgacctgatgacccagctcattcagttcctgcgcaatatggcggccaaaacggccaagcccaatcaaaagaatcgatttcatacttgtctcctttatccgattgcgattttctcctgcggcagacgagagtgggcagggctgctgccaaatgccgcgtagatcaacgtcaatccgccaacacgtcctaaaaacatcagtgcaatcagcaccccctgcgaaaggatgcccaactgcggcgtgatgcccaatgtcagacctaccgttgccacagccgaagcggtctcatacagacagaccgacatcggcagctgctctgccgtagcaatgacaaaggctccgaggaagaacagcgtcaaatacatccctgcaatcgtggcagcattcttgaccgcagaactatctatgcgccgcccgaaaaattccgcatcttctctgcggcggaaggtcgcccacatattggccagcagaacggcaaatgttgtggttttcatgccgcctgccgtggagccgggcgaaccgcccaacagcatcagaaccaccatcaatgcctgtgacgtgctgcccatcgcagcaagatcggcggtgttaaaaccggcagtacggggtgtgacggattggaacatcgacaataaaatgcgctgccgggcagagcctgccgtgaactcgaagcaataaaagtacagcgtcggcagtaccagaagaaacgccgttgtgacaaggatcaccttgctctgcatccgatagcggtgaaagtcaaggcggtatgtacaaatgtcctcccatgtcagaaagccaaggccgccaaagacgatcagggccgcgatcactgtggtaagcaatgggtttcctgcataccgtgtcagcgaaacaaattttgcatcctctgttcccagcaggtcaaagccggcattgcagaacgccgaaatggaatgaaacagtgcataccagatcccgcgcaaaccataatcggcgcaaaatgtcggcagcagcagtgcagcaccagccaattcaaacagagcggtgatccgcagaataaagcctgtcagccgcacgatgccgcccatctgcggggcagccgtagcttcctgcatcgtgctgcgctgcttgagggagatctttcgcccggaaagcagcgcaaaggcagcacccactgtaatgacgcccagtcctccgatctggatcagaagaaggatcacactctgcccgaatgccgaccagtagctgccggtatcctgtaccaccagtccggtcacacaaagggcagaggtagaagtaaacagcgcctcatggaacggtgtaacgcaccgctgctgtgcagcaatcggaagcatcagaagcaacgcgccaaccagatcaactgccgcaaaccctgcaataatgacctgaaaagaagaaaaacggtgctgcctgtaacgaggatattgaatcataaaagctcctttacctatccgtgtgcataaagattagcatggaatagataaaagagtcgtaaagaaaattgtagaagtataaagattccattaaaattgatcgggcaacaccaaataacaaatgctggacatcaccagttaaaaaaaacagtaatatccagcattcattcagatttctaacccatggctcccggccgcattcttcaaatattcttccggctcgctatccagaatcaaattcgcgtagcccagcggatcattgtagatgaggtagtctaactccgacctctgcgccatggtcacgtccagtgcatcctcgaccccggtgcagtcgatggaaatttttctcccatcccggagcagcagctccacgcagccggtgtccatgttgaaatgacaaactcttgcatcgtagcctagaattcttcccgcatggaagaaccctagggctatcttttttgttataaaagtgtttggaacaaacgcgccgcctgcatcggcacgatgcagaacaaatggggtttgggcacagcccaacaagcattttgcaaagcaaaatagcatttgtatagacgaatgccctgcttgctacaaccgcataccgcttatctcgctggaacacctcttgattttaacacaatcggatgttatcctattcttatagaaatctccgaagggcaggtgttttcatgtacaatcatcagctggaaaccttcatccgtgtggcggatgcaggcagcttcaacaaggcggcagaggaaagctacatcacgccaacagccatcatcaagcagatcaacctattggaagattcccttggtgtcaagctgttcgagcgtactcgccggggactaacactgaccaaagcaggccgttccatgtatcaggatgccaagtacatcattcaatactgccatgattctgtcattcgtgcccggaacgcaatgcaggaggattccaacgtcatccgcattggttcctctcccatgacacctgcccagctgctcatggaactgtggtcgaaagtgcagaccatctgcccggacatcaaattccagattgtgccttttgaaaacaccccggaaaatgcacgggaaattctggcggacctcggcacgaacattgatgtagtaggcggcatctttgatgaaacgatgctgcatctgcgcaaatgtgccggtctggaactggttcgcaggccgttttactgcgcggtttccatccatcataaacttgcggcaaaagaccgcttgcagatcacagacctgtacggcgaaaatctactgctgatgcaccgtggatggagccactatgtagatgaactgcgggatgatttatggcagcaccatccacaagtaaatatcgtggattttgaattttacagcatggacatcttcaaccgctgcgaaaacaccaacgatgtgctgctggcaattccgggctgggccaatgtccacccattgctgaaagtgattccagtagattgggattacggcatcccctatggtatcctgcactccccgaatccaacgcctgccgttcagcgttttctggatgcggctaaaatagccagcaaggaattgtatcgctgatacgccactgcaacgagaagctgctgcatgagaaatcatgcagtggctttttctttttacaaaagatgcacttgacctaaagctgactctaagtgttacaatcagggtgtcaagcgggttgtttgaacctttgagttcaaacaagtgaacaaaatggagattccgggaaatgcagacttgcgctatactggaaccagaaaaagagagtacctcaaaggaggaacgaccaatgaagaaagtcttgattttgtccggcagtccccgcaaggacggcaactccgacctgctgtgcagtgagtttatgcgcggtgcgcaggagagcggcaacgaagtgcaaaagatcttcgtgcgcagcaagaagattgtgccctgcaatgcctgctattactgccgcgaccacggcggcaagtgtgccctgaacgatgacatgagcgaaattctggacgcaatgcaggcggcagatgttatcgtgatggcaagcccggtgtacttctactccattgatgcacagatgaagatcatcatcgaccgcagccttgcccggtggacgaacattccgaacaaggagttctatttcatcatgacctgcgcggacgataaccgtgctgccatggcctgcaccttggagtgtttccggggctttaccgcctgcctgaatggtgccaaggaaaagggggtcatctacggcaccggcgtatatcggcccggcgaggtgatgtcctccccggccatgaaggaagcctacgagatgggcaaaaacgtctgatttcccagttttatataaaggagtgtaacggctatgaacaattttctgtttgaaaacaagaccaaggtttatttcggcaagggtggcgtgaaggaatatctgggctgtctgctggagcactacggcgataccgtgatgctggcctacggcggcggttctatcaagcacaatggtgtctatgatgaaatcgtcggtattctgaacgccgagggtaagcgcatcgtggagtttcccggcatcatgcccaatcccacctacgccaaggtgcaggagggtgcaaagctggcccgtgagaaccatgtggatttgatccttgccgtgggcggcggttccgtgtccgactgctgcaaggtggtgtctgcacaggccaaggtagacgaagatttgtgggagctggaaaacaccaagcatactcgtcccactgcgttcatcccgctgggcaccatcgtcacggtgttcggtaccggctccgagatgaacaacggcgcagtcatcacccatgaggaaaagaagattaagggggccctgtggggtgcacaggccgactttgctttcctcgaccccacctacacgttgtccgttcccatgaagcaggtcatttccggtgcgttcgacaccctgagccacgcgatggaaacttacttcggcaagccggacgagaacaacctctccgatgacatcaacgaagccgtcatgcgcagcgtcatccgcaacatccgcgtcctgttgaccgacaaggacaactacgaggcccgcagcgagctgacatgggcttcggctatggccgaaaacggcatcctgaaaatcggcaaggtcaccgacttccagtgtcacatgatcgagcatcagctgggtgcctacaccaactgcaaccacggtgctggtctggcggtcattcacccggtgctgtaccgtcacctgctcccggccaacaccgcacggttcgcccgctttgcacagaacgtctggggcatcgacccggcgggcaaatccgagctgaaactggcacaggctggcgtggaggctctggcggccttcatcaaggagatcgggatgcccaccacctttgcagaactgggcgtccctgccgacaccgacctcaaggctgtggccgattccaccgtgctgaccggcggctgctgcaagaagctgagccgcgaagaactgctggacatcctcaacgagtgcaagtaatcaaggaacgaaaaatacaaaaggagctatttattatggaattcattactctgaacaatggcgtcaagatgccggcagagggcatcggcaccttcctgctgaccccggacaaagctgaaactgccgtgctgagtgcgctgaaagacggtgcacggcttatcgacaccgccaacgcctactgcaacgaaaaagccgtgggccgcgctatgaagaagtccggtctgctgcgggaggaaattttcctcgaaaccaagctgtggccgaccttctacaccgatgccgatgctgtggacaagacgctggcacgtctggacaccgactacatcgacctgctgctcattcaccagcctgccggtgattacgttgccggttatcgcctgatggaaaaggcttacaaggagggcaaagtccgtgccatcggtctgtccaacttcaacgaggagcagatcaaagaaattctgagcatctgcgaagtcaagcccaccatcctccagaccgaagttcacccctacgcccagcagaaagaactgaaagccttcctcgccgagaatggcatggtgattcaggcatggtatccgctgggccacgctgacaagggcctgctggaagagccgttgttcacacgccttgcagcaaagtacggcaagagcaacgtgcaaattattctgcgctggcacattcaggcaggcaatgtggtcattcccggctccaagaacccggcccacatccacgacaacttcgatgtgttcgattttgcgctgaccgatgcagaaatgcaggagatcaccacgctgaacaaggataaacggtattatgaggtcacggaggataagctggcggcattcgccaccatgtttcctcccgtggaagatcagaagtaaatttcaagcagtttgtagctgggtgcggagagtttttttgcggaaaatgaaccagatgaaagggtaaatgaagatgaataagatcacgcgcaaaagttttctgaaagttcttgccgccaccatggtgggtggtgcagccgcttccgcgctgacgggtgcagcggctcctgtttccattgacgagacaaacggcaaggtaagccgctgggtaaagaacaacctgaacccggacggcccgctgacgattgccaagcaaggaatgttctcctccggcggcacggtcacggcaccggtggcaggcacttatgatgccaccaccaactggctggacactacccgtgcaggcaacaccgctcatgtggatcacgctaatgttctgtatcaaatcccggcagacagcaacggttggccgatggtttatctgcacggctatggacagtcccgcatgggctggataaccaccccggacggccgtcagggctgggccgatctgtttctgcgcaacggctactctgcgttcttggtagaccagccccgccgtggtgaggctggcagtaccgcccagatgagcacggacggtttcctcgatacttggtctgccaactccaaggactacaagcccggcgatcaggcatggtacacccacttccgcattggccgcgttgccccggaacggtacgaaggctcccagttcccggagggcgatgctgcacagaatcagttcttccgccagatgacccccaacaccggcgacttcgatcaggcagttgctgccgccgcactgggcgaggtgatgaaggacgtgcagaccctgaccggccacaagtccattttcgtcacccactcgcagggcggtgcagtcggctgggatgtgcccgccgacaacattgccgccattgttgccattgagccgggcggaacccctgccatcggctcggagcagtacacgaaactgctgagcgcaggtattccaatcgctatctactttggcgattacatcgacaacggcccggaagatatcatgtccaccagcttctggcggcgggtacgggacggcgcactggcctttgccgcccagtacaatgccgatggcggtgactgcactgtggtcgatctgccgaaaatcggcatcaccggcaactcccacttcatgttccaagagctgaacaacaaagagatcgctgattacatttatcagtggctggagagccgcgcactggcatgagcggttctctgagattcccggcattttacatagatagaggcgtgtttcgtatgaagaataaaatttcccgccgccagtttttgcaggttgctggcgcatctgctgccgccctgctgctggcttcctgctccggcaattccgctagcagtgtgagcagttcttctgtggcttccagtgaagccgcatccagcgcggctgcttcttcggaagctaccagcacggtaacgactacgggcaaaacactggtggtgtatttctccgccaccggcactacacagggcgtagcgcagaccatcgccgacaccgtgggtgctgacctgtttgaagtcgttccgtctgacccctatacctccgatgatctgaactggacgaacaatgacagccgcgtttcccgtgaacacaacgacgagggccttcgtgctgtggctttggaaagcaccgatgtggacggctgggacgattacgacaccgtgttcatcggctaccccatctggtggggcattgccgcatggcccatgagcagctttgttgccgtcaatgacttcaccggcaaaaatgttgttccgttctgcacgtccctttcctccggcatcgggcagagcggcaagctgctggcagaattagcggacgccggcacttggctggacggccagcggttcagccacagcagcagtgaagccgacattgcaagctgggtaaatggcctgaacctgtaagcagagcttttgtgtgaggagaattttctcttgcggtaatttttgaaatagagggtaaatcaaaaggagaatgtttgtatgaaagcattgctcatcaacggcagtccgcggcccaacggctgcacctttacggccctgaccgaactggcaaatacgctggaagccgagggcattgaaaccgagatcgtccatgtgggcaacaaggacatccggggctgcatcgcctgccgccgctgccacagcaccggctccaacaagtgcgtctttgatgatattgtcaacgaagtagcccccaagttggctgaagccgatgcctttgtcattggcgcaccggtgtactttggttccccggcaggcggcgcgatctcctttatggaccgcctgttcttcagtaccctgaacatcgacaagaccatgaaagtgggtgcttcggtcgtgacctgtcggcgcggcggcaacacagcttcctacgatgtgctgaacaaatattttaccatgtgtgggatgccagtggccagcagccagtattggaacatggtctacggcggctctgccgaggaggtcaagaaagatgccgagggcttgcagaccatgcgcacccttggccgcaacatggcctttttgatgaagagtatccagataggcaagcaacagatcggcctgcccgaaaaagaacctgctgtcttcacaaacttccatcattgaggaagtgttccatattcctccttctttgttgcagggaaagccgggacggaaacgtcccggctttcccattttcctgatttttgcgaggtgattttatgcgcagcgtgattttcgcggtttccaccgctttgaccgttttattatccgcctgcaccggggcggcatcctctgtgccagtcaatacggtttcttcggtttcggccagcacatccatcacgacctcgtccgaagtggattcggctgtttcggagagtgcttcttcggaaaccggaaacatccagactgggcttgtccgggagcagacattggacagcactgaggagctcatccattacagctactacctgccggaggattacgaccccacccggaagtaccccatgatggtggtcatgcccggctataacatgatgtggttcggggaatcttcctccggcagcaatctggactggacggggtttaccagctggacgaaccttggacaggatatgatcgtagtgtctgcccagctcaccgactggggcgacacttcggcgcggcaggccatcgctctgacggagtatttcatcaatcactttgccgtagataccgcccgcatttacgccgcaggctactcggctggcggcgaaaccatgtcgcgggcagttgccatgcggcctgacctgtatgcagcttatctgcatggagcatcccagtgggacggcggttttgcgcccattgcagaaaacggcgtggcggtctacatctacatggcgcagggcgatgaatactacggtgtgcagaaagcacgggatgcctacaacggtctgcacgatgcttacgccgccgcaggctggacggatgaacaaatcgacaccgtgctgcaaatgcagaccccggacaacgcctttttcgatgcgcaggggcttcacgtctaccatgctgccgcaaatgttgtctttgatgatgccgatattctgaactggatcgtttccaaacacaagtgataggagagaaattttgaaccgacggcaattcacaaaacttctggcgggtgtagggctgcttctggcaggctgccgggcaggtgctgcacccagttcctccaccccggaaagaaaggattccatgcaaacgaccacccaaacttatacccgcaccacgcccatcgaaaccgtacggaatgacccggttttcggtgattatgggcggctgatcttcccagtggaacgctcttattacagcggcgacacgctggagcagctgcatcttacctactataacaacatcgacccggacgaaacagtggacatctgcaacaccctgcgccagcgtgcagcggacgggcagaccatcttttacgatatttacaccgaggacgaacaagccgctgacccggacaaagctgacaccggcttattctacttcaagggtaatcccggcgcaaaattttccatctgcaacgcaggcggtgcgtttgcgtatgtgggggccatgcaggacagctttcctcatgcactggaactttcccgcaaggagtacaacgcttttgcgctcatctaccgccccggcgcacagaccgcctgcaaagatctggcacgggccattgcctttgtctttacccatgcggaggaactggaagtagacaccagcggctactccctctggggcggttctgccggggcacggatggcggcgtggctgggcagctacggcacggcatccttcggtgaacaggcgtatccgcagccgggagccgtcatcatgcagtacaccgggctgggggaagtctacggcaacgagccgcccacttatgcctgtgtgggtgaccgggactacatcgcagacgaacgcgtgatgcgctggcgcattgaaaccatccgctctcagggcacccctgccgagatcgaagtttttccgggccttgcccacggttttggcttgggcaccggcacctctgccgaaggctggctcgatcatgccgtagcgttctgggaagaaaacatctgaaaccgtgaggaaactgttatgacgaaaaaatggactgcactgcttctcgcggcagtacttgctgtcggtctttcggcctgcgacaccagccgcgcagaagcccccagcagcaatttggaaagcggagtttccgccatcgaggatgctatgacgaaacgaaatgaaaccgaaagcagctcgttcccggcaggcagcgacctgcgcatcggcacttctgccgacaccgttgcaacgccgaatgatttcccggcagcatacaactacggcactggaaaaattgaggattattcccgtaccgccatgctgcaaaagatgccggaaccagtggacaatgcgaccgtgctgaacacctcggcagaccctaaccatattcaggcgttgtacctgtgggaagaaggcaacgttccggctaaaacgcagttcaccgctgcaatgaccggttattttgacaactgggatttccgcccctatgtgacggcaattcccgtccgcaccggagtacaaccgaaaggtgctgtggtgttgatggcaggcggtgcgtatcagttccgtggaaactataccgattctctgcccacggcagcggctctacgggagctgggcttccagaccttcatcgtagattaccgtctgtcgccctacacgcaggaggaaggcgcgctggatgtagcgcgggctgtccgctttgtgcggcagaatgcggatgtttacggcattgaccctgacgatattgcagttatgggcttttccgcaggcggcattcaggcgggcgaatttctgatgcactacgatgaagatgtcaacggcactgctctggatgaaagctatgtacccgatgcgctggatgctgttccggctcacgcttcggcggcgggcatgatctattcgttctatgggcggctcagcgtgggcaacatggacccggactggctggccgagggtgatctgccgccaacattctacgtttacggcacggaggaccccttctaccgccaattccagcagcagtatgatgtgattcggaatatgggcatttccgccggacgcatcgtgctgaatagctggccccacggctttggctcggatggcggctgggtgaacgattacgccgcatggctggaaagtgtttttgcaaataaggaggaatcttaacatggaatatcgtactttgggcaatgacctgaccgtttcggctgtgggtctgggctgtatgggcatgagccatgcctacggcgcacctgccaacaagaaggaaatgaccgaactgctggcgcaggccgtgggtatgggctatacgttctttgacaccgccgaagtctacggcacaccggataatccccacgacaacgaggaactggtgggtgctgccctgaagccctaccgagataaaatcgttctggcgaccaagttcggcatccattttgacatgaccagtacggcagtcaacaagccgctggtgccggattcccgcccggaagttatccgtgcatcggtagatgcctccctcaagcggctgggcactgaccatattgacctgtattatcagcatcggcttgaccccaaggtacccattggggaagtggccggtgtaatggctgacctgattcgggagggcaagatcactcactggggcctttcggaagccaccgaggagaccatccgccgagcacacgcagtctgcccggtaacggccatccagaaccgttactccatgatggcccgctggtacgaaagcctgttcccggttctggaagaactgcacattggttatgtggcattctcgccgctggcaaacggttttctctccggcaaatacgataagacttccaagtttgaagcaggcacggactaccgcagcgtcatgccgcagttccagccagacagcattgaccagaaccacgccctgctggaactgttacaccgtcttgccgccgagaaaaatgcgccacctgcccagatctcactggcgtggatgctgtgcaaaaagccttatatcgtaccaatccccggcacccggaaactcaaccgtttacaggaaaacgccggtgcagcggatattgtgctgtctgccgtagaagtggctctgattgacgaagcactggcgcacatggaaatgtcgcatgtgtttggcgggagccgcattgagaaagagtaagacagcagctttgacgatgagcttcaatagatcatgcggaggtaattgtttttgatatgtgcggcttttcaacgagggtgatcctatcaatttctatgccgtcttatgtcttactccgcaagagttgtatgacacgctggaaaatgatctcgcggttgaaaaagaggtgcagaatccgcaaagagattgatttcggctaaattattgtgtaattcatttgcttttcatttgtttttatggagcagtctgatacaatattgcgtattcagacaaaagaacgccagaaaggtccgtaacgtcctcgctggcggttcaggtgtttttgttctgctccgaaaattctgtcaaatggattgcaagcgatcttgttgcttccagcagtgttttccgcatttctggtggacaagcaagatagattgcatcccattctcggcactcactttccaattctgacagatttggattgatgattgaatccaaggaaaggggtaggacatggaggattgcactcaaaatgtcaaaagaaggattttgctttccgttttcaatattggcgatatacttcaccgaaacatggctttttagtgccagctgatcttgtgtcattcccattgcttttcggacagcctttatctgctttcctaaagcaatcgcatccgcattcggcatcatcatcacctcaatagtattgtatcgttcttgcggaaagaacggtataacatcatcattccagtgattttgtcctatcgtgccgatgtgttatattgcgccagcttcccgccatgggaggctggcgtttttgcgcttttggagccaaagtgccgcagtccaccgtttctcctatgatacagcagcaaactttatatttgggagggaaagtcatgctcgatcataagaaggaagcgattacggaacactggcagttttgccccaagtgcaatataaagctctatcgaatgaccgccgactgcactggattcatccatataaaatgctggcgttgccgggaaatgttatggctcaacctttccattcgggccaagtaagcattgatttcataaaaatcgggtgcaacgcactctgaatatggactgttcgcaccgagcaacgggccgtcacctccgggtgatgtatgaaacgtagcaccaaatggccgggcagcagcttgactgaaagctctccaatctttcggtcggctgttgtccggctatttttatagcttcagatcgcctgcttccgaaaaggagcaggttttatgtttgccctcttttcatggctgccccagatggcgaaatatccgtagtgtttccaaattttcggcatttcacgttttatcgaaaatttggaggttacacatgggctttaattatggtttggaaaagaagaactttgaccgtcagtgggctatcatgcgcaagcagtatgaggacgctggcatgagcattgaagtgattcaggcaatgtatgagtatgactggtctgttttcaatgctgcgcgttcttaccagaaccacacgcaggagatcaccgctccgtcctttgaacagggcgaagaatcctactcgccccttatgaacaagtatcaggaagcaatttctgttaccgaacactaccgcgaaaccaagagccgcttcacatggattggcgaaattgagaacgaacggctgttgtctgctcttgaaaatttgtcggacgcagacctcaaccttgtcaccatgtatgcctatgaggggtacaccgtcactgaaatttctaaagttttaggtgtcgcgcagcctactattagtatcaaaatcaagagaatcactaaatttttgaaaaacttcaatttcaatgctatggattga

SEQ ID NO: 539 - DNA, 24453 bp, unidentified
  source 1..24453: mol_type = unassigned DNA
ttatacaaccgtcacaacacctatttcaacttgattattgattctggggatgaatacggggttgctcagacctgcgcagacaatcatttttgtgccgtcaaggtcaaattcgcctttgtcatatttcggaaaaagaccctgattcggagcgattactccgccgatgaacggcaattgaatctgtcctccgtgggtgtgaccgcagacgattaagtctatgtcggttttctttgcgtcctcggcaatgtattcgggctggtggtgcagaagaattgtgaaattgttctttgctttttcggcaaattcttcccacagcgttcttgacggaacatcgtcatcgggagtgtagaactcataataagggtagtcgctcattccgccgataagcacactcttgccgtttttggtgaattttatgtattcattatcgagcaatacagcgcctgttgaatttgtttcgcttttaaaatccgttccgaatttggcggcattgtcacgctcatggttgccgagacagcagtatgtgggtgcaatttttgaaagcttttcaagcacatctttcatcttcgttgtgtcgggatcgccacggttgaccatatctccgcaaactgcaataaaatcgggattttgttcctttacaagctctgcaaggtctgcgttcttttctccgtattccttgttgtgcaaatccgtgatgacaacaaatttcagctttgcatcgttcttagtattgtttacacagtaatttgtgattgcaattgtgttgtcacagtaaacgccccatattacgagagtcacaaacagcacaagtattattgctccgaggattatcgaaaattttttcattcaattcaccgctcatattaagtatggtattattttaggctcgttttgtgcggttgtcaacaaatgtgtgtcgaacaagtctgattattactgttccttgtgctttgattgtcggattttaagttgatttaggaattgctttgtttgacattccttttgcactgttgtataataaatcataattgtatttatatgttactcgggaaatttacacaaagttaaacagaagaggtatgggttatgaagaagattaatttgcgtaagatgtttctggctctcgcagatgtgtttattatcgttgtcagcggtattcttgcaaattatattctctcacttgtcggttacataggtactgcttcaagcaaaggcttgttgagctatattgttattgatcttgtcatgtgtctgtttacgctttatataagcggaacatattcaaaattgtggcgatactttaacgcaaaggactatattgtgtgcggaactgccgtcttttctgggtttacgctcggctttgtaatctcgttgtttttgcagattccgcagagaaagattttttgtatagtacatttcgcaatagcccttgtcggaattcttgcattccgttttgttttcagaagggcttttcttgaccttaccgaggcaggaagggcagagggcggagagcgcacccttattgtgggcgcaggcaatgccggcagaatgattgttcgtgaaattcacaatgcgaaagagcagggtgatgttaataatccttcaaaaagcatcattccggtatgctttgtcgatgatgatttgaaaaagctgaatcagaaaatcgaaggaatccccgttgtcggaacctgtcccgaaattgttaaaatatgtgatgaataccgcatagacaatattattgttgcagttccgtcatgtgaggaagatgagaagaggaagattcttgactactgttccgcaacagagtgcaaaatcaagattatcccttatctcggtgagcttttgtttgatgacgggcatacacagcttatttcacaggcaaaggaaatcaagattgaggatcttctcggcagaaaacccattgagtttgaccgaaaggagattcatgaccttatcaacggaaaggtttgtcttgttacaggcggcggcggttcaatcggcagtgagcttgtaagacagattgcaaagaatgatccgaaacaaatcatcattgttgatatctacgaaaacaacgcatatgacattcagcaggagcttgtgcttgaatacggcacaaagcttaaccttgtaacgcttatttcatcggttcgtgattacgacaaaatggagcttatcttcaagacatatcgccccgaactcgtattccacgctgccgctcacaagcatgttccgcttatggaaaccgttcccgaggaggctgtaaagaacaacatcttcggcacattcaatgttgcaacccttgcagaaaagtacaaggcaaagaagtttgttatgatttcaaccgacaaggctgttaatccgacaaatgttatgggcgcaacaaagcgtgcgtgcgagatgattattcagtacaaggcgcagcacagcaccgataccgaatttgtaacaacaagattcggtaatgttctcggctcaaacggctcggttattccgctgtttcgccgtgagattgaaaacggtgcgcccgttaccgtaacacatcccgatattatcagatattttatgactattcccgaggctgtttcgcttgttcttgaggcaggtgcaatggcaaagggcggtgagatttttgttcttgatatgggtgctcccgtcaagattacaacccttgccgagaaccttatcagaatgtacggtaaggttccgtacaaagatgttccgattattttcacgggacttcgtccgggtgaaaagctttttgaggagcttcttatggacgaagaaggtcttaagtcaacacagaacaagaaaattttcataggaaatcaaattaaaatagacgaaacagatatgctgtcaaagcttgaggttctcaaaaagaccgcagaaaacaatgacagtgaaaagacagttgaacttttggcagaacttgtacctactttttgccacaaggtcaatgattaaccgaaaaggagaaattttatgtgcggtattgtaggttatgtaggacctaaggattgcagtgaggtgcttgttaatgctctcacaaagcttgaatacagaggctatgactcggcaggtattgcggtttttgataacggagaaatcaagaccgtaaagaccaagggtaagcttcaggacttaaaggataagcttgcagaggtcggcactccgaaaggtcatgtcggcataggtcacacccgttgggcaacccacggcgagccttcggatgtaaactcacatccacacagcggtacaagggttacaatcgttcacaacggtattattgaaaactatatggagcttaaagacttcctcatctcaaagggaagaacttttttaagcgacacagatacagaggttgttgctcagctcctcgactataaatacaacggaaatcctcttgaaacaattgacagtgtaatggctgagcttaagggttcgtttgcactcggaattatgttcaaggatttccccgacagagtttttgcggttcgccgtgaaagtcctcttatcgtaggcgttgcagaaggcgagtgctttattgcgtccgatgttcctgcaattcttcagtacacaagggattattatcttcttgaccatgatgaaatcgtaacactttcatctgacggtgtttcgttcgttgacgaacaccttgatccgattgaaaaggaacttcaaacagccgactgggatatggaggctgccgaaaagggcggttatccgcactttatgattaaggaaatcaacgaacagcccgaggctatcagaacaacgattatgccgagaatcaaagagggacttccgtttcttgaggagtgcggcatcacaacggaaacaatcaagaatttcaaaaatatcacaatcgttgcctgcggtactgctatgcatgcaggtatggtcggcaagtatgttattgaggatctcgcaagagttcccgtaaatgttgacattgcgtccgagttccgttacagaaatccgattgtaggcgagggcgaccttgtaatcatcatttcacagtcgggcgaaacagccgacagccttgccgcaatgcgtcttgcaaagcagaagggtgcaaaaactcttgcaatcgtaaacgcaaagggcagttcaattgcccgtgaggcggatatgctcatctacacactcgcaggtcccgaaatttccgttccgtcaacaaaggcatacatcacacagctttccgttatgtatctctttgcctttgagcttgctcttgcaaaggaaacaatcagcacagccgagtgcaagcgacttgtttcggctcttacaaaaatgcctgaggcagttcagtatgtaatcgacaactgcgaggatatctgcaagttcgttgccacaaagcttgttgcaaccgacagcttgctttacataggcagaggtcttgactatgccctttcaatggagggttcactcaagctcaaagaggtttcgtacattcactcagaaagctacgccgcaggcgagttaaagcacggcacaatttcgcttattgacgaggatgttcccgttatagccgttgcaactcagacaggtattatccccaagacaatcagcaatgttgttgaggttaagtcaagaggtgcaaaggttattcttgtttgcacagacgcctgtgcaagagaactcaaggacggtgttgcggattatgttatcgaaattccgcatacagacgagcttcttatgccgattacagcggttgttccgctccagattcttgcttattacacatcaatcaacagaggtattgatcccgataagccaaagaaccttgctaagtcggttactgtagaataaacggcggtcttgtatttaattgaaaatggaaaattgaaaatgtaaaattatggtcgggaaggcaatttgcaagatgcaaatcattgtcacccgaccattttttatttatatgaaagtatatgcttaattgtgggagcgtccaatgaacgctcctacataacttactcttgttttcaaatttaaacggtaaaaaccttgtatttttttgacagattatgtataattaattagatatacattctaaaaagcagtattgatgaatctaatttagtttcgggggaatatacggacatgatgaaaactgtttttaaaagagctgtaacgcttgcaatttgtgccgtaatggtattttgcggtatttttgcctgttcaggcgcaacaaaagattacgagattccgcagattgacgatatgacgctttcaatgcctgacggtatgagcgctgttacaagggacagtaaaagcacagataaatatttttctgttttcggtcttgattatgacacaacaatgaaaacctttcagaacggaaatatctatcttcagggtatggataatatgtcatcggttattctgaccgtgacaatgacaaaaaatgagagcagcgagaatgtcggcaactatgctcagctttcttcaagcgagcttgcaaatatacgcaacaattttcttaattcagacgagtatcggagctgtactcccgaccaaaaagaaaaagttgtgtggcttgtgtttgacgcaactgctcagagcagtaagggcgatgtgaaaacctttgttgccaacacggtttatgacggtatgaacattaatatcacaatgcagagaacagagggtgatgttacaaccgttgactacgatactttttccaaagttgtatcttcggtaaaattcagcgacctgccgttttcaaagggatttattccgtacataatcatcggcggcggtgttgttatccttattttgattgttctcatcataatttttgccgtgagaatcagaaagcataaaaaggctaagaagaataacgctattcttgaggagcttgcagtcaagtataaactcggtgaaaagggtacggactacgacattgacaattttgacgattctcccgaaaagcccgataaacgctcaaagaaaaagcagaaatatgcggaagaggttgaagaagaaccggcttcgccgggcagaagatatgctcccgagccgataatcgaaaatatggaagaaccggaagaaattacaagtgagtattcaaactttggttatgacacggatgacgccaaggaaaaagaaattgacgagataatcaactccgcaaaggcttacaagagtgagcttgagcgtgaggcatataaaaacaactacggttacgaggaaaacagcacggaggacgaaaaaaaaaaggagcctaccgcagcagatacctcagagactgaacccgaaaaaattgacgaaaacgaaaaagataacgcagaaacacctgaaaaacacgaggacataagctcttcgtcaggtcctacactcgttatccccgaacccgaacacgatctttttgaaacaagcgagcctgacgatatcgaccgtgaggacgatgccgatgttgaagaaaccgaggaggtttccgaacaaaagcatccgcttgaaaaaaaggttgacaagtacgcaaacatcattttcggcagtgacgatcccgaggagaaaaccggggaagaggttgatgatgaggagcttgtaagggcaaaggctaagaaaaacaagtttgacagcggttatgacttttttgacgaagctcccaaaaagtcaatgggggttatcaaaagctcagacctcagagatgccgaggactttgatgttatcggcgaggttgaaagaaaagcagaaaccgtaaagcagaacgctcttgaaaaagagaataataaagaaaccgagggtgaaccgaccgataaacggtcaacggaagaggttcttgccaatgtaggcaaaaacatcggtaacgctctcaggggctttgcaggcggagttaagaattttggcattcactgcggatatttctgcaagaatgtttcaataatgataaagcgtaagcgtgcaattgccaaacgcaaaaaggcagaggaagagagaagagagagagaaagacaaaaggcagagcgtgcaagaatgcgtgccgaaagaggcgaaagtgacggacttgttcaggttcacagcagaaccgaccgccgcccacagcagaatcaccgccctgcaaacagaaacaagagaagatgatttcttttcttaacggaggaaaaacatggaaatgctaattaaaaacgcagtggttgtttcccctgccgacaagcttaacgaaaaaacagatattctcataaaggacggtgtgattgccgaaatcggcagcggcattacatcagacggagagattattgatgcagacggtctttgtgccgttccgggatttgttgatatgcatgtgcatcttcgtgatcccggtcagactcacaaagaggatattatcacgggatgcaaggcggctgccgcaggcggtgttacaagcctgcttgcaatgccgaacaccaacccgacaaccgacagctccgaaattgtaaagtatattcttgacaaggctaaagatgccgacagccgtgtttatgttgcggcaagcgttaccaaggggcttaaaagcgaagaacccacagacattgacgctgtgaaaagtgcaggtgcaatagcacttaccgatgacggcagacctgttgaaaacacaaagtatttgagtgacgcaatgaaaaaagctccaaagctcggcatgacaattgtcgcacattgcgaggacttgtttcttgccgacggcggtaaaattaacgagggcgaggtttcgaaaaagctcggtatcaagggaatccctgccggtgccgaggactgcggaactgcaagagaaattgcacttgctgccgctcttaacgagcctattcatatctgccatgtcagcaccaaaacaagcgttgcacttatccgtgatgccaaaaagagaggtgttaaggtgaccgccgaaaccgctcctcattatgtttcgctcacggacagggagcttttaagaggtgacgctgattacagaatgaatccgcctctcagaactcaggctgatgttgacgagattatcaacgggctttgtgacggcacacttgatgccatagcaaccgaccacgcaccgcacacacccgaggaaaaggctgattttgtaaaagcccccaacggttcaatcggcatggaaacctcgtttgcggtctgcaacacatacctggttaagacaggcaaaatgacgctttcacagcttgttgagaagatgagtgttaatcctgcaaggattttgaaaatcaacgcaggcacactttcagtcggtgcaaatgccgatgttgttcttataaatcccgatgaagaatggacagttgatgctggtaaacttcacggcaaaagcaaaaacaccccgtttaagggcagaaccctcacaggtaaagtcaaaaagacaattctcggcggtaaggtagtttttgaagattgagcaaataaaacccgtaggggcggatattatccgcccgcaagtaatagtgcgaaattgttgttaaaacaaattatataaatgaaacaaagataatgatatactgtagcggcgaaccgtgtttgccaatcggttaaaatggcagttaatgactgtcggtaaataaacagaaaatttatttaacataaaggagtaaaattatggcacagaaaggtgacctcctgtcggtaagacaggatatcagagtagtagacgcaacaatccgtgacggcggtctttgtaacgatttcagatttgacgacaaatttatcaaggctctttacaatgcaaatgttaaagccggtgttgattatatggaattcggctacaaggcatcaaaggaaatctttaacgaagaagatttcggtaagtggaaattctgtaacgatgcagatatcagaaaaattgtaggcgacaacaagactcctcttaaaatcgctgttatggctgatgtcggcagaacagatttcaagaaggatattatcgcaaagaaggacagcccgattgacctcatcagaattgcaacatacatcaacgcaattcctgcggctgttgaaatgattgaggacgctgcaaagaagggctacgaaacaacaatcaatattatggctgtttcaaaggcaagaaccgaggatattacagcggctcttgaaactctcggcaaaactccagtaaacgctttctacattgttgacagctacggcgcactctatcccgaggagtcaagacgacttgcagacctttactgctcaattgccgacaagtacggcaagtcggtcggtattcacgctcacaacaaccagcagcttgcttttgccaacacaattgaggctatgactcagggcgtcagctaccttgacgcaaccgttgacggcatgggcagaggtgcaggcaactgtgcgcttgaacttcttctcggtttcctcaagaacccgaagtatcaggttgctcctattctcaaaatcattgaggagtacacccacaagtttaaggctgagggcgttaagtggggttacgatattccgtaccttctcacaggtcagtacaacacacatccccgtcctgcaattcagttcgtaaaagaggacagacaggattattacaagttctcaaatgaactttatgatattatcaatagctaattaaatttgtagcggcgttcattgaacgccaatcgaaccgattgcaaaatcggttcgaccatacaaacgatttgaattaaagtaattaaccacgatataacaatacatttgttgtttattcgttttggtttcacaaccaaaacgattggcggtcattgaccgccgctacggttaagcaatgacattgtttaaatcaaaatatgaacgaacaaattgtttttacattacaaaaaatgaggagaatcactatggcatttgacagacttatcgaaaatattgtaaaaatgcagaatcctacggttgcaggtcttgacccaaagcttgactatgttcccgaatcaatcaaaacaaaatgctttgaaaagtatggcaagacgcttgagggtgcggctgctgcactttttgaattcaacaaggcgcttattgacgcactttatgatattgttcctgccgtaaagccacaggctgcatattatgaaatgtacggctggcagggtgttaaggctctttgcgacacaatcgcttatgcaaagtcaaagggtatgttcgttatcacagacggcaagcgtaacgatatcggcacaactatggaggcatatgctacggcacacctcggccatacagatgttgcaggcgaaagtattgacgcattcggtgcagacgcactcactgtaaacggttacctcggaacagacggtatcaagccgcttgcaaaaatttgcgattcggacgacaagggcatttttgttcttgtaaaaacttcaaacccaagctcgggcgaacttcaggatatgaagcttgaaacaaatgagagcgtttatgagcatatgggcaagatgtgcgaaggctggggcgaagaccttatgggtaagcacggctattcggcagtaggcgcagttgtgggtgcaacatatcccgaacagctcggtgaaatgagagcaaaacttccgcacacatttttccttgttcccggttacggtgctcagggcggcggtgccgatgatgttaaaaacgcatttgacgaaaacggtctcggtgcaattatcaactcaagccgcggcattatgtgtgcatggaaaaagcaggggcttacagaagacgactttgccgttgccgctcgtaaagaggctgagcgtatgagggatgaaatcgttggctgtatcggcaaaattaagcttggctgattcatttgcacaacagaatcacgaaatttttcgttttttatgctttagtgctatgaatttattgactttagcgtgctaaaagcgtataattaaaacgtatttatttttacaactatatttttaaattttttttaaaaagggagatatcagaaatggcaagagtatataatttttcggcaggtccttcaatgctgcctgagtctgtgcttaaaaaagcagcggcagaaatgctcgattatgagggcagcggtcagagcgttatggaaatgtcacaccgctcaaaaatttacggtacaatcattgagggtgccgaggctcttttgagagaggttatgaacattcctgacaactacaaggttcttttccttcagggcggtgcgtcaacacagtttgcggctatccctatgaaccttatgacaaagagcggtaaggctgattatgttattacaggtcagtgggctaaaaaggctcatgcagaggctgcccgttacggtcaggctaatgttgttgcttcatcggctgacaagaccttcacatacattccaaagcttgatccttcaacattcacaaaggacgctgactatttctacatttgcatgaacaacacaatttacggtactgtttatcatgagcttcccgacacaggtgatgttccgctcgttgcagatatttcttcctgtattctttcaagaccgattgatgtttcaaaattcggcgttctctatgcaggcgcacagaagaacatggctccggcaggtcttacggttgttatcgttcgtgaggatcttatcggtcacgctatggatatcactcctacaatgcttaactggaaaactcacgctgacaacggttcaatgttcaacacaccgccttgctacacaatctacattgcaaagcttgttcttgagtggattaagaacgaggttggcggtcttgataagatgtatgaaatcaacaagaagaaggctgaccttctctacggtttcctcgattcttcagagcttttcaagggtactgttgttcccgaggatcgttcgcttatgaatgttccgttcgttacaggtgacgctgaccttgacgctaaattcgttaaagaggctactgaaaacggtcttgttaatatcaagggtcatcgcacagtcggcggtatgagagcttcaatttacaacgctatgccttatgagggcgttgaaaaactcgttgagtttatgaagaagttcgaggctgaaaacaagtaattattgaatattataattattgaatattatgatataacgggcgaacgctgttcgcctgttattgtaaattcttaaaataaaaaattaaaaaggattgattttgatgtataacattcttacattaaacaaaatcgccgctatcggcacaagccgtctcggtgataactataaatacggtgacgatgttcagaaccctgacgcagttcttgtaagaagtgccgcaatgcacgatatggaatttgccgataaccttcttgcaattgcaagagcaggcgcaggcacaaacaatattccgaaggataagtgcagcgagcagggcattgttgttttcaatactccgggtgctaacgcaaacgctgttaaggagcttgttatcgcaggacttcttctttcaaatcgtaaggttattgagggttatgaatgggcaaagactctcaagggcaacggtgcagctgtcggtaagatggttgaaaagggcaagagtcagttcgtcggtcccgaaatcaagggcaagaccctcggtgttatcggtcttggagcaatcggtattcttgttgcaaatgccgctgttgctctcggtatgaatgtaatcggctttgacccgtttatgtctgtgggcaacgctctcaagcttgctcctactgttaagctcatgaagagcgcagaagatgttatggtaaattgtgactacctcacaatccatgttccgcttactgacgacacaagagatatggttgatgccgatatgattgccaagatgaaagacggtgttcgtattctcaatttcagccgtgacggtcttgttaattcaacagcagttcttgaggctgttaagagcggcaaggttgccaagtatgttacagacttcggaacagacgatatcctcggtgaagagaatattatttgcctcccacacctcggtgcatcaactcccgaaagtgaagaaaattgtgctgttatggcttgtgatcaggttaaggagtacctcgagaacggtaacatcatcaactctgtaaactatcctgcaatttcacttgcaagaacaaatgctgacgatacccgtttctgcgttgctcacaagaatgttcccgagcttctcaagaaggttctcacacagatcagcggcaatgttgaaaatatgctttcaaagagccgtggcgactatgcttacacaattattgatgttgcaggcgccggtgcagatgaccttgcaaaaatcgcagcagttgacggcgtaatcagagttcgtgcaatctgatttcgattaaaatttaatcgttgaaaatttaatctatgaaaaaagtccgaacacgcaaaatgttcggactttttgtttgtgtgaatctaaatatgtagcggcgttcagtgaacgccaatcgaaacgattgcaaaatcggttcgaccgtatttcaaaatattggtgtatggttgatttggctttgcagccaaatcaaatggcgatcactgatcgccgctacgtatcgctatatattaaacttttaccagatggtatttttttgcattggcaattataaatgttacggaaattgcaacggcacacaattctgcaacgggcaatgccgaccatacaccgtttatgcctataaacatcggcaaaatcagcattgcggcacactcgaaaacaagtgttcttgcaactgaaatcacggctgaaatcttgccgttgttgagagcggtgaaaagtcccgatgcgaaaatattcattccgcacaacagataatttattgcaaaaattctgaatccgctgagtgcaatctgctgaattttttcgtcgcctgccgagaaaattccgacaagcggttctgcaaaaaattcagatgccgtaatcattgcaaccgaaattatcagcgtgatttttatgcataatttgaacagcttttgcagtttttcgtgattttgtgcgccgtagttaaagctgatgacgggtgaaactcccgaagtgaatccaaacgaaaccgcagtgaaaataaagtgaatgtacaaaatagcacttatagccgcaacgccttttgcgcctgcaaagtgcatcatttgaatgttgaacagcgctgttgtcacggctgttgaaagatttgtcacagcctctgacgagccgtttgccattgcaaagaggatttcacttaccttgaattcaggcttgccaaagtgcagagtttgctttttgttgaaaaagagcaaaagcggaattgcacccacagccattccgataatggtgccgaggcctgcaccgattattccaaaatcccacactgccataaaaagaatgtcaagcacaatgtttgtgcaacccgacagtatcgagaaaacaagcatgatatgtggcttgtccgctgttacaaggtacgattggttgagcatctgccagcacattacaaagccgtacggaatcataacgctgccgtagtcaatgcagtaggggagaatcttttcgtttgagccgaacatcatgtacataggttcggcaaaaattgtgaacagcacagcaatgataacagaaatgaccgttgccgtgattgcaacaccggacataagtcggtttgcctcctcctgtttgccttctcccattttctttgcgattatagcatttgagcctgttgaaaacattaagcccacagccataaatacgagcgtgaacggatatacaatattgattgcagacaatgcgtcacttccgacacagtttgcaacaacgattccgtcaacaaccgtgtaaagtgacataaaaaccatcataagaacggttggcaaagtgaatttcagaatcgtttttgctttgataggttttgcataaattgatgttgccataaaacttccttaccctcaaatttatatttttcacagaccactcaaatgattgtatcataactttgtcgcaattacaaccgatttgtctttttttgtaaaatatgctattatatacagacttaaaagcgaaaaaaggggcggttttatgtttaagggcgcagtttttgatatggacgggcttatgattgacagcgaaaggcttgtttattcaatctggcaggaaatgcttgatgaggacggcaaagagtttaatctcgacattttcaaaaagacaatcggacttcgcagtgaggattcctacgaatattacaagtcggtttacggcgatgattttgactatcctgcttacaaggcggagtcgagaatccgctattttaagcgtatcgaaaagaacggtgtgcctgtaaaaaaaggcttgtacgaaatttttgattatttaaaatcagtcggttgtaaaatttcgcttgcaacttcaacctcgtcacaaacggctttgaagattatgaagaaaatcaatctctatgataaatttgacgcattcgtgtgcggcgatgatgttaaaaatgggaagcccgatcccgaggtttttttgattgccgcaaagaagctcggacttgagccggtggactgcgttgcgtttgaggacagcattaacggcataaaatctgcacatgccgcaggtatgaccacagttatggtacccgatttgctcgaacccacagacgaaattaaaccgatgatagattttttgtgtacggatttaagcgaagcgatagaacgaatttcaaattgaaaatggaaaattgaaaattaatgtcgggcagacagtttgtaatgtaaaaaacatattatgcccgagcgtagtattgcaattgttcgcacaaatctataggggcagatattatccgccacaggcggcggtcgcaaggctaccctacgagtttatggttcttgcatattgttggctcaattatccgagaaaattacaaataattacaaatggttacaatttacaaaaatacaattgagcagggctgattattatacacattttccacatagttttcaacaattgttgaaaaagaacggcaatgcctgttgagcgttgctacggttactgcggaaaaggggaaaatgaaaaataattattgaataacagcacgataatatgttatactttggtaaacaacaatctttacggaggacaaaatgaagaaaattataaataaaaaatcactcaagggtacgcttgctgttatgttgtgtgccgttatggcgttttctgtctgcgcctgtgactttgactctgacacagaaccaaccaaaacggatgcacaaattcagtttgataaatattgtgacgatttgttttcggaagaacttgaggatgacgctcttaccgcacattttgacatttcaaatccgtcggactacggtctgaaatatgacgaggaggactataccctcggtcatgtgtccgatgaagatacaaaagaatcatttgatgaactgaaagaggcaaaaacggatttggaggagtttgaccgttcgggacttacttcttctcaaaagcagacatatgacacccttgaaagctactttgaaattcagctttcatatgatggtacaacagaattgcagagtatatttgcaccgcagtcgggaattgttgcaaacctctttaccaccctgtccgagtttactttctatgaaaaggatgataccgacctttaccttgctgttttgaaggacacaaaacgctatatggacgagtgcattgagttcacaaggaaacaggctgaggacggttactttatggctgaagatatcgcacagcagtcaattgacgagtgcgaaaagcatattaagaatgacaagtccgtgcttgttgacgagtttgagtcgagaataaagtcactcggtcttagcgattccgagaaaaagactgttgtcgaaaccaacaaaaagtattttgaagaatactacattcctgctttgaaatcagcaaattcagcacttgaaagtctcaaaaaatcaggcaaaaacgaagaaggtctttgcggttacggcaaaatcggcaaaaagtattattcggcaattgtcaaagacaaaacaagcagcagcatgactcccgaggagcttaagtcatatcttacaaacagctttacaaaggttggaatgagcatgagcaatgtttcacaggatgacttgagcaaatttcaggactacaaacctgactttaaggacgccgatgaggtgcttgaatttttgattgagaatatcgaggaggactttccgactcccgttacaacctcttacacggcagattatatgagcgattccgcaaagagcgacaatgtggtagcgtactatgttcagggacgaattgacgatacaagcgttaatatcatcaaaatcaaccccgactttgcaaataagggtatgactcagatgtacactactcttgcccatgaaggctatcccggtcatctttatcagtttaccgcatcaaatgcaaacaaggatatcccgaatgtacgcaagattttaagctttatcggtgcaaccgagggttgggcgcagtatgcctcgaaatgtacgcttgattaccttgatacaagcgagggcattaagaagcttatctacgcaaatgatattctcggctacattctctactccatggtcgatgtcggtgtgaactacaacggctgggattatgaaaaagtcaaggagtatatgtcaacggcactcggttcagctgacagcgagagcgttacagccgcaacaaaagaggcgtatgaccttgcccgttcaaatccgggttattttctcccatataccgtaggctacctcaagatgattgatatgcgtgaaacagccgaaagcgagcttggctcaagctttgacgcaaaggagtatcacacattcattatgaatctcggaatcacaagcattgatgtatatgaaaaagcccttgatatgtggcttgaaagcaaaaagtaaatttttggtgataatcttgaatattttttacaggtatgatatacttaactcattgatatgataaatctaaattggtatggatttttctaagatgtgattcttattttcgccatacactcattatgggtgtatggcgatttttattttacgcaaggggtgttaatatgggcgttaaaacggaaaacaaaatggcttatgaacctgtcaacaaacttataattcaaatgtcggcaccgccgctgatttcaatgttttttcagtattcatacaaccttgttgacagtatgtttgttgcggggataaatgaacaggcacttgcggcagtatcgcttgcattcccgattacaacgcttatgaatgcgttgtccgtgtggataggtgtgggtgttaatgttttgattgcaggttatttgggacagaaaaatcagcaaaaggcaaattctgcagcggctctcggagtggtaatttcggtagttgtcggagtgctgataaatttcctttcgcttttcataataaatccctattattcggcttttacgcaaaacaaagagatttttgaatacggaattgcgtatatgagcgtctgcgtttttatgcagataccaaatatggtgcatattgtaattcaaaaaatacttcaggcaacaggcaatatgattgctccgatgtggtttcaaattgcaggtgttgtattcaattttgtgtttgaccctttgctcattttcggcataggtccgtttccgaaaatgggtgtgatcggagctgcagttgccacggttttaggctatgttgtttcaacaatcattgcgttgatacagctgtttcttacaaaacaaaaggttaagccggtgtttaaaaactgccttgaaccgcagatgataaagctgatattttcctacggattgccctcgtttgttatgaatgcgttgggagcattcaccgtgaattttgcaaatatgtttttggtgcgatattcggacacggcggttgcatttttcggagcatatttcaaggttcagcagttgatttttatgacggtgaacggactaattcaaggctgtttgcctataatgcggtttaattacagagcaaaagagtacggtcgccttaaacaagcaaataagagcggaacaattatcgcgactgttatgatgattgtcggtatgctcttggtgctgattttcccgaaagagatattgtttttgttttcggcatcggaagaaatgtgtgcttttggagtgctggcaatgagaattatgtcactcggatttgtgttcagcggcttttctgcaatgattgcaacctatgaacaggcaacagacagtattatgcccggcgttgtagttcaactgttgcgacagggcgtgctgttagtccccgtaatttggcttttaaacagcgctgttcaaatgacaggcatatggcttgcgttcccaattacagaatttgtcacatttcttgttgctgttgtatttgcaaaaattaaaaatcattgaataaataaaaataacaaccgtcaaaacccgatataatggattttggcggttgtttgttatttaaaatatgtttaattttaaattgtttttgcaaaaacattatcagatgattttgctctgaaaattgtttttacgagcaagaatgttatataaacataaagtgaggtgtagatgattgccgtaaatttaaggtctataagctcgtaggagaacagatagtagcaatagcctctcaggcttataagcgttgacacaatcggaatccacaaatgctttgcacttactgccgcatagacaattaaaataatgtcaagcagataaccgtagcgttcgtgcattgacgaaaggaacatgatacaggtgaacacagtccacgctgttgtcagaagaaaagtttcaaggtttttcaaatcaacctttttatagatgataatgcacatcataattccgagtacggcaattgtcagaaagaccgaaaactgcttgaacagataataatatgtcatatcgtttccgtcacatatgagtgcataaaagttcggacagttcatctgaataagctttccgtagtcggtctgttccgcatatattgtgatgatatcgataaacggtctacccataataattgcaggcaggcacattatcacatcaaccgcagggattataaagaaatgcagaatcgaaattttctttgtcgaaatccagtaataaagcagaacaggaatgatgaatacggtttgcagcttgaatgcaaacgcaatgccgatgaacacaaacgatgcaatcggcttgtctttgtgcaaaaacaggattgcaaggattataaacgaggtgtaaattgaatcgcactgcgcccaaaacgatgagttaaaaatcaccgttgccgaaagaagtacggctgagtaggtgagtatcgctttgagccgtcggttattctttgcaaacgaataagcaagcattgcggttgaaattgcaagtacaaaatcgaatattattgatacgattttgtacgcatacagagcatttagcggcaaaagagtcataagatagattatgacttgatacggaatgttgtagttacccacctgagttgcaagccccgtaaaatcattcagcttgattatgctccaccacgaatttaaaaagctgttgaaatcatcgctttgaaaatccattccgcaggctctgaggaaaattgcaataatcgttaccgcaacgagtaaaaataaaagaatgtgtttttttataaagtcaatgactttgctttctgcttttgtcatagagaaaattcctgttcgggtttaaataaaaccgattttcttcataaccttgcccattgtgcggctgctgattttaagggcaatttcatcggcttttctgtaacagctttcaagatatgccttgtctgcaacaagcttttcgtagcgttcacgaatcggacgaagttcttcaacaactgcctcgcctacagctgtcttgaagtcgccgtagcccttgccggcaaaatccttttcaatctgctcgtatgaaagacctgtaactgcgctgtaaattgccataaggttatttacgccgtctttgccctcagcatagcgaacctttgcctcgctgtccgtaacggctctcttgaacttcttcattataacctcgggtgcatcaagaagatgtacacagccgttgacattttcatcggacttgctcatctttcttgtcgggtcctgaagactcataacccttgcaccgttctttggaatgaaaccgtccggaatcttgaacacattgccgtaaataccgttaaaacgctctgcaatgtttcttgtaatttcaatgtgctgtttctggtctgcaccgacaggcactttgtcagcctgatagagaagaatgtcggcagccatgagtacgggatatgtgaaaagacctgcgttgatgttgtcggcatgctttgcagacttgtccttgaactgcgtcattcttgaaagctcgccgaattgtgtgtaacagctgagcgcccatgcaagctctgcgtgagtgtgaacatgactctgaatgaagaaaagacttttttcaacatcaataccgcaagccataattgaagcataagcgtcaattatattcttacgcataacggcaggagtctgtcttaccgtgattgtgtgcaaatctgcaagagcgtaaatgcagttgtattcgttctgcattgtaacccagttgcgaaccgcaccgagatagtttccgagtgtaattgttccgctgggctgtattgcgctgaatacaacctctttttttgtctgattttccattattcccctccgtgattaaagactgtttgcatactcgccgaggatttttattcctctttcaagctgttcgtcagtcggtgttgaaaagtttattctgaaactgtgacaggtttcgttttcgtcagttaaaaatgcgttgcccggaactacgcaaacctttttgagaacgagttctttgcagaaattcggcatatcaatatcctcgggcaagtcacaccagatgaaaagaccaccgtcaattttatgatatgtgattttcggtgcgcagtatttgtcaagaagctccatgcagaagttcgctttctttgtgtagatttcacgaagctttgcaaggtgagcgttaaagtcatactttgtgatgaattcatcgcatacatattgtgaccagatgtttgtatgtacatcgttgccctgtttgcacacaacaagcttttgaaaaatcggctttggtgcaattgtgtaagcaacacgcatacccggtgaaattacctttgagaatgaaccggcatagattacaattccgtccgtatcaaagctttttatgttcggaacatattcaccgctgtaacgcaggtcgccgtacgggttgtcctcaatgatgagaacaccgtattttttggcaagctcataaactttcttacgcttttcaaggctcattgtaacacccgaaggattttgaaaattcggaattgtgtaaatgagctttgcgttcggattggcttttaaagcctcttcaagcttttctgtgctcataccgtcaggctcaacgggaacacctgcaagctttgcgttgtagcttctgaatgtgttgagcgagccgatgaatgacggtgcctcgcagattacaacatcgccctcgtttacaagagcctttgagcataaatccataatctgctgtgcgcctgttgtgatgagaatgtcgtcattgtcagagcctgtgttatgctcctttttcatatattccgtaaggtgctttctcagcggagtgtaaccctccgaaacgctgtactgtaaaaccgaaatcggatcttctgcaaaaacctttgccgagatttccgcaatctcctttgagggaaatgcatcgggtgacgggtttcctgccgaaagcgacacaacgctcggatcggcggcatatttaaaaatttctctgatagcactcggcttcaggcttgaaaccctgtcggaaaacctgtattccataaaaatatctccttttaagatgataaggattttttaaaattccataccctgtaattctatcacgaattgcatatatgttcaagaaatttgactgtttttactgcgattttattcaaaaaatgtgtaatttattattttgcatttgtaaatgttaattcacggaaattgtattttttgtgctttttgtattgtttttgatgagtttctgttgtataatctaaatgataatgtccttacggtcagagcaaggcttgctttgattcaaacaggagtacactgcgcgtaattaatacacttatataattcattgaattcaaattgaatttaaaaatcttcggtttgggagagtaacactatgagcagaagaaacgattacgattattttgatcttgataatttcgatgacagcattgattcccgtgaatatcgtcgcagacagcaacagcgccgttctgcaagctatgccgcaagaccgtcatcacagcgtccagtcagaagacctgtaaaaagaagaaacaaaagaagaaccagaaacagaattattatcgttgtgagcgcattggtaattctgtttgttattatttttattataacttcaatttttaagggttgttcaaaggaagatgcccttgcaagcgttcccacgggaacagtgggcacaacggcgtctcccgacgaaaccgcaaaatcttcgaccgctaacaaagcagacgagctttctcctacatactttatgacaccgggcataaaggacgacaatacaaacggaactctttcgtacggcatttatgtgtggaacaaaataggctacgaattgttcagcagtgatgacgcaagagcgcagaactatgctcagacaatcaatggctttgcagacaagttcggcagttccgtaaaggtttatgatatgattgttcctaaccataccgaaatgggacttccgcaaagactcaaagacagcgacgctccgtcaacctcacaggctgacaacatcaaggcggcttatgcggctctttccgacaaggtaactccgattaactgctacaaccgtcttgcggaacataatacagattacatctattttaagagcgaccaccattggacaggcctcggcgcttactatgcttacacagcatttgccgatacaaacgatttgcccgttctttcgcttgatgattgcaaggaacagaagattgacggctttacaggctcgtttaccaactcggcagacggtcttgacagcgatacggtaagttattggaagttcccttataatgtaacaatgaatattacacaggcagacggttcttccgcaagctatgacagtccctactatgaagccgcagagggcggttcaaacacctacggtgtgtttattatgggtgataatgccctcacggttctgaaatcagcttcgaaaaatgcggcggcaggcaagaagattgccgttgtaaaggaaagctacggcaacgcttttgttccgtatcttaccaataactacgaagaagttcatgttatcgatttcagatatttcaaacagaatcttgttgattactgcaaaactaacggaattgacgaggtgctttttatgaacggtgtaatgagtgccaacactcaggttcagcttgacagtatgagcggactttttaactga

SEQ ID NO: 540 - DNA, 5901 bp, unidentified
  source 1..5901: mol_type = unassigned DNA
tcagcccacaaacacgtatttttccagccggtccatggcctcccgcaccagggaatggggcagggcggcgttgatgcggatgcagtcgccatcgccgaagcccgcgccgttctgccagatgacgccatgctccacgccccggcggcggagatcatccggcgtgatgccgtggctgcggcaccaggccccgcagttgacgaacagcatatacgtcccctggggcagcatcatggtgacgccgggatagcggctttgcaggaagtcccggatataccgcaggttccggtccagcacggcgcacagctggtccacccacgccatgccctcgtcgctgtaggccccggtgagggcgtgcatggacagcacgttgcagtcgttgtagccggacaggtttccctgccgctggacccggcagcgaagccggtcattatagatgatgtggtaagacccgatcagccccgccaggctgaaggtcttggtgggggcatagaaggccacggtgcgctcccgggcgtctcgggagacggactgggtgggaatgtgggtgtgtcccggcataatcagatcggaccagatctcatcggaaatgacggtgcagtcgttggcggcgtatacctccatggccttttccagctcccagcgctcccatacccggccgcagggattgtggggagagcacaggatagccacatggatgtcgttttccttcagcttccggtccatgtccgcatagtccatgcgccagatgccctccgcgtcctgcgtcaagggcgtgtggatgatgggacggcccagccgctccagggtgtgggtgaagcctacataggtggggctgtggaccagaatcggctcgccggggcaggtcagggcctggaccacggagctgacgccgcccagaacgccattttcatagccgatgtgctgccgctccaggccggtgacgccgtggcgcacctgctgccagcggatgatgctgtcaaagtaggcgccgctcagctgaaaatatccgaaattcgggtggtccagccgggcccggatggcctccagcaccggcggcgcggtggggaagctcatgtccgccacccacatggggatccgggaaaagccctccttgggctccaccccgtcataggggatcatgtccagggccagggcgtcccggccccgccggtccagaatggtatcgaaatcgtactgcatggttatcctccgttctccgttccggacaggtggaacacccgccgggtattttccagtatggctgcctccgcagtttccggcggcagatgcttcagccgggcgatctcctccacgatgcgcggcagcagcagggaggagttgcgcacccggctcagggattttttgctgcccgtccagggtacgtccggcagcacataggggctgtcggtctccaccagcagccggtccaggggagcgcgggccactgcgtcccgcagggcctccgattcccggcgcagcagcgccccgccgatgcccagacagaaccccaggtccagataggcccgggccgtgtcccagtccccctggaagcagtggaccaccccgccgggcagctgacgccgcctgcgccgcagcatggccagggcgtcccggtccgccatgcggatgtgcagcaccaggggcagtcccagccgccgggccaggcccagctgataccggaaccacagcagctgggtcagccggtgcttccggggcaggtgatagtccagcccggtctcgccgatggccgccacgccgggctcccgggcccagacctccagctgcctgcgctgccgccaaggggcctgatgggtccgggtggggtgcacgcccaccgccaggcggatgaagtccggatgctgccggtacagggcagcggtccggcggttggactcaaagtcgatggcgggctcgatgcacagggcgacgccgctctcccgcagacggtccagcaggtcctcccgctgtccctcccgggccgtcaggtcgccggtgagatagcggaaggcgccgtcgaagcgtttgtggctgtagtgggcgtggctttcgatgatcatgcgcgggtcctcctctccgggcttacgcttcttccggctcctccggctgtgcaggggcctcccaggggaccatggtggccacgcaccggttgatggtgaccccctgctgatagaatttggcctcgtagtccgtcatgacccccacggggccgtcggcgtggaggtcccgggtgacctgggacagccggaagccgaattgggggatctcctccagggaccactcgaacagcttgtcgttgtcgcttttgaagtggatctcgccgcccatgggcagcacccggcggtataattgcaggaaattgccgtgggtcaggcggcgctttttctggttgcttttgggccaggggtcgcagaagttgatatagatgcggtccacctcgccgggggcgaagaagtcaggcagacaggcggcgtcgccgtccacaaagtacacgttgtgcagccccgcgtcccgggcccgttccatggccaccaccatggcgtcggggactttctccacggcgatcagcagcacgtccggctcggcggcggcggtttccgcggtgaagcggcccttgccgcagcccagctccacccgcagctcccgggcctccggcagcagctcccgccagcggccccgcagagcacgggggtccgccaccagcagggcgccgcaggcttccatccggggcagcagattctttttctttctcatacgcatgggtcatttcctcctgtgcggccatggccgcgaataaaataccaactctatatataccacaagatacacggttctgtaaacgaaaaaaatgctccatttggtgccggggacggttttgtgaccggattatgaacatgtcatattgaaaaatgtgcaaagaaaattcatttcttttgtgaaatatcctgaaaaagaaaaagccgggaaacaagggcttgataatttttagacgagggactataatacaagctgtatgaagagtacgcatgatgggatcgctatgggcggcatcccgtcgcgcgcccgccgctgcggcgggggatcgaagcaaggaggaacgatcatgacgaatgttctgttggaaaagaagggccacatcgccgttgccaccatcaaccggcccaaggccctcaacgccctgaactcccaggtgctggaggatatcgaccagctggtggagcaggtgaaggcggacgacgagatccgcgccctggtcatcaccggcagcggcgagaaggctttcgtggccggcgccgacatcggcgagatgagcaccctaaccaaggccgagggcgaggccttcggcaagaagggcaacgacgtgttccgcaagctggagacgctgcccatccccaccatcgccgcagtcaacggctttgccctgggcggcggctgtgagctgtccatgagctgcgacatccgcctgtgcgccgacaccgccgtgttcggccagccggaagcgggtctgggcatcaccccgggcttcggcggcacccagcgcctggcccgtctggtgggcatgggcatggccaagcagctgatttataccgccaagaacatcaaggccgacgaggccctgcgcatcggcctggtgaacgccgtgtatcccctggaggagctgatgcccgccgccgagaagatggccgagaccatcgccaagaacgcccccatcgccgtccgcgcctgcaagaaggccatcaacgacggtatgcaggtggatatcgaccgggccgtggccatcgaggagggcctgttcggcagctgcttcgagactgccgaccagaaggagggcatgggcgccttcctggaaaagcgcaagcacgagccctatcagaacaagtaaccccatttggttaattaacaggctccttaccgggcctgatgattaaaatcgctacttaaataaaaatttatttaggaggaacaatcatgaaagtcgcaatctttggtgcaggtactatgggcagcggtatcgctcaggttttcgcagcgaagggccacaccgctctgatgtatgcttccagcgttcccagcgctcagcgtcataaggacaagctggccgcctctctgaacaagaaggtcgcccgcggcaagatgacccaggaagctgctgatgatatcatgagccgcgtcctggtggaggagttcgaggccgccgccgatgccgacctggtcatcgagtgcgttgctgagaatatggccaccaagaaggagctgctgggccgcctggatgccatctgcaaggaagatgccatcttcgcttccaacacttcctctctgtccatcaccgagatgggccagggcctgaagcatcagctcatcggcatgcacttcttcaaccccgtgcccgccatgaagctggtggaagtcattgccggcggcaacacccccgccgagctggttgagaagatcaagaccctgtccaccgagatcggcaagacccccgtggtggtcaacgaggctcccggctttgtggtcaacaagatcctaatcccctattgcaacgagggcgtttgcgttctgcaggagggcgttgcctctgcggaagatatcgatattgctatgcagctgggctgcaaccaccccatgggccccctgcacctgggcgatctgatcggctgggacatcgtgctgaacatcatggacgtgttgtataacgagacccacgatagcaagtatcgcgcaaacgtgctgatccggaagatggttcgtgccggcaagttgggcatcaagtccggcgagggcttcttcaactacaaaaagtaaatctgtaaaggagaaaagagtatggatttccatctgacgaaggaacagctgctcgttcgcaagatgtaccgcgaattcgcagagaacgaagtaaagcctctggccgctgagatcgacgaagaagagcgtttccccatggaaaccgtcgagaagatggcaaagctgggcatgatgggtatttatttccccaaggagtacggcggcgccggcggcgacgtcctgtcctatgccatgtgcgtggaggagctggccaaggtttgcggcaccactgccgttatcgtctctgctcatacctccctgtgcgccgcccccatttttgagaacggcaccgaggagcagaagaaaaagtatctgcctgacctgtgctccggtcgcaagatcggcgctttcggtctgaccgagcccggcgccggcaccgacgcccagggccagcagaccaccgccgtcctggatgagtccggcgagaactacatcctcaacggttccaagtgcttcatcaccaacggcaacgtggccgacaccttcgtgatcatcgccgttaccggcaagaccaccgataagcgcggccgctccatgaaggagatctccgctttcatcgtggagaaaaccgataagggtttctcccagggcaagcacgagaagaagatgggcattcgcggcagctctacctgcgacctgatcttcgaggactgcgtgatccccaaggatcgtatgctgggcaagaagggtgagggcttcaagatcgctatgaagactctggacggcggccgtatcggtatcgcttctcaggctctgggcctgggcgagggcgccgttgaggaagccatcaagtataccaaggagcgcgtccagttcggcaagcgcatctcccagttccagaacacccagttccagctggccgatatgcacacccgcatgcaggccgctcagtacgtggtgtacgctgctgccatgaagaagcagaatcacgagccctattccatggatgccgctatggccaagctgtttgctgccgaggccgcttccgatgtgacccgccgcgccgtgcagctgttcggcggctatggctacacccgtgagtatcccgtggagcgcatg

SEQ ID NO: 541 - DNA, 15076 bp, unidentified
  source 1..15076: mol_type = unassigned DNA
atggctgacgttgtggcagcatggatcgaccgtgacaggagcgcgggcggaagaagccgggtatcgcagtcaggaaaagtaggacatcgtagctggataaaccaggaaaaaggggaaaatcggatgctgcatatcagaaatttggaagagggcgtggagctgttcaaggtgcttggctcggatatccgggtgaacatcattttactgctgttaaaagaaaaagaaatgaatatgaatgagatcgcagccaggctgcagatcaccaacggcgcgctgaccagccatatccgaaagctggaggaggccgggctgatccgtgtgacccaggacagtgtcggacatggaaaccagaaggtgtgcagcgttttggaaacccgaatcctggtggagatcgggacgcaggaggagacagacgaaggcagtattttccgggcagaaatcccggtggggcagtattcggactatcaggtatttcccacctgcggcatttccacgacgaaaaagatgatcggtgaagtggacgatccccgctattttgcccatccggatcgcgcggaagctggaattttatggctttcgaaaggctatgtggaatatctggtcccgaatatccttccggcaggacaaaagatagacgagcttaccttcaccatggagatttccagtgaggcaccgggctttaataacgactggccctctgatattacctttttattaaatgacacgccggttggagtgtggacatctccgggagactttggggacaggcacgggctgtttacacctaactggtggttttccggatggaatcagtacggactgttaaaaatgcttgttatcgatcagaacgggacatatattgatggaatgaaaatttcagacgtttccacaactcagctgcagctcgattataaaagccagattcggttaaaatttgccgtacaggaggatgctgcccatgtgggcggcatgacgctctttggcagcggctttggcaattacagtcagggaatccgtgtgcggatgcgctacagcccgatggaaaaagggaatgaatgagatctttagaagaatagaggtgcggcctcagctgatttgttcgcctttttgtcagctgaggccgtttcttttgtttgctacgccttttctccctgcgctggttttttcatacaggcatctaccgatttacgcagaatcttcgcttctccaaagcccaggcggaaggatttgctgtcctgcatcgttaccttaagcatggagatggatcggatctgccgcatgttgagcaccgtattactggcaagcaggacaaagttatcatatttgtttaaagtgccgcaaaacgaagcaagggacatatcggttgtgtagtctctgccgtcggcagtgtgaatgcagacttgacggttgtttttcggccaagcgtaggaaatttggtcctccgtcaggtaaatggtgtcggtctggttgcggaattcgagtttttttaccttgctgtttttaatggacagcagatggtcgatggtttcggtaagctcggaaacgacaatgggcttgtccagaaaaagcacattatcgggaagatttttcgatttgcggtagtctaccttatcgcagcaaaaaacgatggggacatctgtgccatcggcccgaagcatgtgggaaagctcgatcgcatcgcagccgtcttctgtcatatccataaaaattgcatcatagatcataggcgttacgaggatagattccttactgccgaaagagtccacatacaggacaccggttgtattcatgcggcggtcagattcccgtccgagaaggcgttccatttgttttcggtccgccatatggtcatcacagattgccaagtgcataatgatacctcctgatcttttgtaaatagcattcaaagatgcgattttgcgaatggtgcgagtgaactgtaaattttttagctgcgttttacaggatgcctgtaagcgccggcctgttataagagggaaatggaaacaggaccgaacaggatgtacaaaaccgcagcaatctgtaggattaaaatagcgggcattccccagacgaactgtggatgcagtgtcttgtgatggaatgtatacatcccggcgatgcttccgatgctgccgccgatgatggcgagcagaaacagcgtcgattccggaatgcgccatgccttgcggcgtgcgcggtttttatcaattcccattgcagcaaatcctgcaagatttacaatcagcagataaattgccaaaatcagtaaaacatccattcaaaaactccctgtatttttaaaaattaaatcacttcgtatttattataggatttattataggagatcgaaaaaaagatttcaagaagccggggcaaaaaaagatacgagtgaactgtaacaaaaagggcttccgtgcttttggcacagaagcccttttttagcgtatagtgattagttgttgttcttttctacttcctgcatcttcattgcacgaaccttgctggaaagtccgaacaggttgatgaagccttctgcatcgtggtggtcatacagatcgccggttgtgaaggaagcaaggctttcattgtagagagagtaaggagaagttgtgccggctttgatgatattgcccttgtagagcttgaattttacttcgccggttacatattcctgagtcttttctacgaatgcctgaactgcctcgcgcagaggagtgaaccatttgccttcgtatacaatctgagccatcttgttgcccatatcgatcttttctgcataggtatcgcggtcgaggatcagctcttccagctgctgatgtgcctccatcaggatcgttccgccgggagtctcataaacgccgcgggatttcatgccgacaacacggttctctacgatatcgacgatgccgatgccgtgctttgcgcccagcttgttcagagtgcggatgatgtcggaaaccttcatctctacaccgtttacgctcttcggaacgcctttttcaaaggtcatggtaacatattctgcctcgtcgggagcttcctcgggagtgcagcctaaaacaagcagatgtccgtagttgggctcgtttgcgggatcctccagctccagaccttcatgactgatgtgccagatgttacggtcgcggctgtagctggaatctgcagagaaaggaaggtgaatgccgtgagcctggcagtattcgatttcggattcccgggaatccatggtccacttatcgtttctccatgcagcaatgatctttaaatcaggagccagggctttgatgccgagctcgaaacggatctggtcgttgcccttgccggtagcgccgtggcagattgcggtagcgccctccttgcgggcaacctcaaccagcttctttgcgatcagcggacgcgccatagaggtgcccagcaggtatttgttttcgtaaacagcatgtgcctgtacgcagggaacgatgtattcgtcgcacagttcgtcatttacatcgaggatatataatttggaagcaccgcaggagattgctctttcttccagaccgtccagctcttcttcctgtccgcagtcgatgcagacgcagataacttcgtagtcgaaattctctttcagccacggaatgatggctgtggtatccagaccgccggaatacgctaaaataactttttctttcatgataattactcctccatatgctgtgtttgatttttctttcaagctgtgtcaagataaggatggaagcatccgttcccgactgactgaaattactatacacccggatgcgaaggaatgcaagtgtaaatttatgcaaattataaatattttattcagaaaaaatggaatatattccaaaaatacttgaatattatacacgaatgcagtatgattatgcaatattaaggaggaaaagaaaatgattcaggttggaattatcggagcgaccggctatgccggcggggagctggtccgtcttttatacgggcataaagaggcagaaatcaaatggtacggatccagaagctatgtggatcagaaatatgcgtctgtttatcagaatatgtttcagattgtagaggatgtttgtaaggatgataatttaaagcagctggcaaaagaggtcgatgtgatctttaccgcgacgccccagggcttcctggcaggagttctggatgaggaaatcctttccaatacaaaggtgatcgatctgagtgcggattttcggatcaaggacgttgctacttatgaaaagtggtatggaatcgaacataaatctccgcagtttattccggaagcggtttacggtctgtgtgaaagaaaccgtgaggcgatcaaacaggctcgtctggtagcaaatccgggctgttatcccacctgctccattacttcgatctttccgctggcagcagagggactgatcgatatggatacgctgattattgatgcaaagagcggtacctccggggcagggcgtagtgcaaaggttgcaaacctgtactgtgaggtgaatgaaaatatcaaggcatacggtgttgcgagccatcgccatacgccggagatcgaggagcagctgtcctatgcggcaggctgtccggttgtgctgaactttacgccgcatctggttccgatgaaccgtggaattctggtgacggcttatgcttccttaaaagaagtgaaaaagcaggacggaagccttggactgccggatgctgcaatgattcgggcagcctatgacaaatattatcaggatgagaagtttgtgcgcgtgctgccggagggtgtgtgcccggaaacgaagtgggtagagggcagtaattttgtagatgtgaacgttaaggtcgatccgcggacgaagcgtgtgattatgatgggtgccatggataatctggtgaaaggcgcagcaggacaggcggtgcagaatatgaatctgatgtttgggctggaggagtccgaggggctggatcttgtgccgatgttcccgtaagggatggtggattcccggcagactttgaccgccccggctgccgactgcaattgcgtccccttgatttgcaagcgaaacttttgcaaaaacgcacaggcttccggcaccgaacgtccgactgtccgaagcaggcatgcacaaccgccaaagcagccaaaaacctaccaccatgcctgcaagtttcggacgtgaggtgcgcccttaggaagccgacgcgcttttgcataaaagtttcagcgcgcaaatcccggggacgcaatgcagtcggctgccggggctggcaatcaatctgcgcggtgaggcctggttgcctgcggcaacagcggcctgtgaggtagggctgagtttgttgggggctggtcggctgcgccgactgcgcctacttcggcggtgaggcctggttgcctgcggcaacagcggcctgtgaggtagggttgagtttgttgggggctggtcgccgtaggcgactttgccctgttggggtaaaaaggtcttgattttccgtggagttgtttgtaaaatctagggttagagaatttttgtgctttgaaatggctttgaaggattgaggtgttttggatggctgtcgggcaggagttggtggtgcatcctttttcgccggttgtggacgggcattccagagtgttgattttgggaagtctgccgtcggtgaagtcgagggagaatcatttttattacgggcatccgcagaaccggttttggaaggttttagcgggggtgtgtcaggcggaggttccggtgtcggtggaggagaaaaaggcttttttgctggcaaatgggatcgctgtgtgggatgtgatcgcttcctgtcggattgtagggtcttcggacagctccatccgggatgtggcagcaaacgatgtggccgggcttttgcaggattccaggattgaggcggtgttttgcaacggcgcaaagtcatgggagttatatcacaggtattgtgagaaggcatgtcagcgggaagcggggaagcttccatccacgtcgccggcgaatgcggcatggtcgcctgaacggctgataaaaagctggggcgaggcgcttttgccttatgttggccctggcaggaaaggataaataacaatggttacagtgcgcagcatgcaaatagaggattatgatcaggtatacgccctttggatgacgattcacgggttttcgatccggacgatcgacgattccagagaaggggtggagcggtttttgaagcgaaatcccggaatcagcgtagtagctgagatggacggcagagtggtcggcgcgattttatgcgggcatgacgggcgcaggggctgtctgtatcacgtctgtgtgcatgaggattaccggatgcatgggatcggcagggcgatggtggtgcactgtatgaatgcgctgcagcaggagggcatcaataaggtgtccctgatcgcgtttacgaaaaatgatatcggcaacgccttctggaagcagatcggctggacgaagcgcgaagatttaaactattacgattttgttttaaatcagaaaaatatcgaaaatttcaacgcttgagcgggcaaaagatactgctcaatctgacataaaaagaaaggcaggaggaacatatggagatcattacaggcggcgtaaccgcggcaaagggatttatggcagccggcgtagaggccgggatcaagtatcagaacagaaaagatatggcaatggtgtattccaaaacgccgtgtcgcgcagcgggcgtgtttacgacgaatgtagtaaaagctgctcctgttttatgggataaggaagtcgtagagagcgagtgggaagctcaggcgatcgttgtaaactccggtatcgcaaatgcgtgtaccggaaagctcggctatgaatattgcagggagacggcaggagcggcagcagatgcgctggagatttctcctcagagcgtcctgatttgttcgaccggcgtcatcggtatgcagcttccgatggaaaaaatgaccgaaggtgtgcgtatgctggcaaaggcgatcaagcccggagaagaagcaggaaccgatgcggcaaaggcgattatgacaacggatacccgcaacaagcaggttgcagtaaaggtgatgattggtggaaaagaagtaaccatcggcggcatgtgcaaaggctccggcatgattcatccgaatatgtgcacaatgctcgcatttgtgacaacggatgtgaatatctccaaaaagcttctacaggaagcactgagcgctgacgtgcaggataccttcaacatggtttccgtagacggcgatacctcgacgaacgatacgctgcttgtgctggcaaacggccaggcgggaaaccctgaaatcacggaaaagggcgcggactacgatgcgtttgtggaagcgcttcattatgtcaatgagacgctggcgaagaagatcgcaggcgacggcgagggcgcaaccgcgctgttcgaggtaaaggtcattcatgcggataataaggaagatgcaaagaccctggcaaaatcggtcatcacctccagcctgacaaaggcagccttgtttggacacgatgcgaactggggacggattctgtgtgcgctgggctattccggggcaaaattcgatcccgaggcgatagaactgtatctggaaagcagcgccggaaagatcctgatcttcaaggatggtatggcggcagattacagcgaggaagaagcgacccggattctgtcctgctccgaggtgactgcgcttgtggatatgaagatgggcgaggcggaagcgacagcctggggctgtgacttaacctacgattatgtcaagattaacgcggactaccgcagctgacgcgaaccggcgttagaacgataaaacagtctcacagcgccgcaaaaggaaacgtgcgcagaaatgggaggaaaaagtggaaaaaccggaaatggaacagatcatgaaaaaggcggaggtgctgattgaagcgctcccctatatccagaaattcaaccggaaaattatcgtggtaaaatacggcggcagcgccatgagcaatgaagagctgcagaaaaacgtcatcaaggacgtgacgctgttaaagctggtagggtttaagccgatcatcgtacacggcggcggcaaggccatcagcaaatgggtggcaaaagccggcaaggagcctgtttttgtcaacggattgcgcgtgacggacgctgaaacgatggaaatcgcggaaatggtactggggcgcgtcaacaaaaatctggttgcaatggtacaggagcttggcgtacccgcagctggcatcagcggcaaggacggcggtcttctgcaagtggaaaagaaatattccgatgggaaggatatcggctttgtcggcgatgtgaccaaagtaaatcccaagattttatatgatctgattgaccgcgattaccttccgatcgtagctccggtgggcatggatgaaaattgcgagacctataatatcaatgcagacgacgcagcgtgcgcgatcgcaagggcggtcggcgcggacaagctcgtgttcctgacggacgtagaaggtctgtacaaggacttttctgataaatcctctttcatctcccgcattacagcaagcgacgcggaagcgcttgtcagcagcggcgagatcggcggcggcatgctgccgaagttaaacaactgtacggcggcggtcaaaggcggcgtcaaccgggtacatatcctggacggcagaatcccccactgtctgcttttggaaatttttacagatcatgggatcggaacggcgattgtcggagacgatgagtaggtttaaagcagtgcgaagcatcttcggcacaaagtgcctgcggaatggaggaaacatgggtgaattgatgcagcagtatatcgacgaagccgagcaggatcttctgcatacctataatcggtatcaggtcgttctggatcgcggcgacggcgtatctttatatgatatagaaggaaaacggtatctggattttgtggctggtattgcggtgtttgccctcggctatcataatgccgagtacaatgatgcgctgaaggcgcagatcgacaaggtcatccacacctcgaattattattacaatgttcctgcggtggaagcggcaagacatctgaaaaaggtttcccggatggaccgcgtgttcttcaccaacagcggtgcggaagcgatcgagggcgcgatcaaggcggcgcggaaatatgcttatttaaaagacggcacgacggatcatgagatcattgccatgaatcattcgttccacggtcggacgatgggagcactgtcggtaaccggcaatctgcattatagagaggcatttgagcccggaatcggcaatatccggtttgccgatctcaacgattttgacagcgtgctggcatgtgtaaatgacaagacgtgtgcaattttgctggaaaccgtgcagggtgaaggcggaatttatccggtacaggaggactttctgaaaaaagtgcgcgcgctgtgcgatgaaaaggatatcctgctgattctggatgaaatccagtgcggcatgggacgaaccggctattggtatgcgtggcagaaatatggcataaagccggatatcatgacgacggcaaaagcccttggctgcggtgttccggtgggtgcatttttaatgacggaaaaggtcggacagcattcgcttacggcaggcgaccacggcacgacctacggcggcaacccgctggcatgtgcagctgtggcaaaggtgctggagctgtttgaagaaaacaatattctggagcatgtgcgggaggtgtcggcttatctggaagaaaagctggacagcctggcagcaaaatatgattttatcacggacagaagaggcatgggactgatgcagggacttgtctttgaccgtccggttgcgcctgtgatcaacgcagcgctggaaaacggcctgattctgatcaatgcgggaaccaatattatccgcttcgttccgcctcttgtcatcaccgacgcagatgtggatgaaatgatcgaaattctggattcatgcctgaaaacgtttcaggagcaaaacgcgtagctgccgggaaacggcggcgcggcaaaaaagaaagaaatggagaggaacatgtctttttacccaaaactgatcggggcggtctgcggtgtctgtgctgcgggggctttgatttatgcgggcgtctctgccatggataaggcaggcgtttctacggacggtattttgtcgcccaaaccgacgctgacggtatggtataccgaggaaaaactggaggattatctttccgcgatggcgcttgaatatcaggatgcgaccggcgtgcgtgttgttccggttttgaaaagcggtctggaatatctcgaggcagtaaacggcgcttccatcgcagaggaatcgatgccggatgtttacctgatcagcaatgacggactggaaaaagcgtaccttgccgggctggcggtaaatgtgaaggatcagaatgctgtcctgaataccgaaaatttcccgcagactgcactggacgctgtgacctatcagggacatgcggttgcttatccgctgtattttgaaaccagcgcgcttgtatacaaccagacgtatctggagcaggcggcggcagagctggaaacggacgaggtgtccctgattccgaaaacgattgatgatatccggaattttgcggatgagtacaacgcgccggaaacggtagaatcggttttccgatgggatgtatctgattttttctataattatttctttgcaggaaattatatcaccgttggcggaagctgcggggatgattcgtcccggatcaacatctataatcaggatgcggtttacgggcttgcggcgtaccagaagctgagtcagtttttctcgatcgatgcggcgacttcgagctacgaccaggttgtgcaggattttttggatggaaagctggtttatacgatcgcgaccaccgatattctggatcgggttgcgcaggcgaaggcggacggaagctttgcgtgggaatacggcgtagcgtccctgccggatatcagtgaaacggtttgctcccgcggtatttccgtgaccggaagcattgttgtaaacggctacggcaagcatcaggacgaggcggataatttcgcagcatggctttgcacggacagcgcggataagctgtttgaccgcagtacccttgtgcctgccaaaaagagcgcagcgcagcagacggaggagatggcagcgttctggcaggaatacagccagacggttccggtgccgaagctgatggcgactgcgaacttctgggtacagatggagatcgcggagacgaaaatctgggagggagaaaacgtttcggacgttttaaaagacctgtcggaaaaaatcatgacacaggtaaccggcacgcagtacgtggaagaagaatatatcgaagtgcctacggagactcaaatcgattacgccgagggcgaagaagaataagaacgtgtataaaaatccaaccataacgcatactgtatttcataccggacgctgtcagggcggacggaagaaggaggcttgcaggatggttggatttttgattgcagttttatccggggttctgatgagcgtgcagggcattttcaatacacaggtcacaaaagcgtcgagcatctggtctgcgaatgtgtttgtgcaggcgacggcgctgctgtcgtgcctggcagtttggcttgcagcggaccggtcgaatctgtttgccgtgtttaggagcgagccgaagtatctgctgcttggcggcgtactcggcgccgggattacctggacagtgattaaggcgatggcgatgcttggacctgcaagggcggttctgtttatcgtggtggcgcagatcgcggcggcgtaccttgtggagctgtttgggctgttcggcgttgaaaaagcagcgtgggagtggagaaaggcgatcggacttgctgtagcggctgtcggaattgccgtttttcagtggaaatagcgcccggaatatgctatcctaccagtagtgagaggtctgcagaagaagctggattttggtatctgcagccatgaaatacaagagaggatgtgtatttgattgtcttatcagacgttatttttacagcagtcttatcgggactgtacgaaacagtatgaggaaattctgcacaacccgaacctgccgttgtgggattatgtggtgctgacggcttcgaacgaggcccaggctcaggcatatcgtgcgcagatttcctaccgcttaaagcatcagatgctcccggaaaagacgcactatgcggtgctgcccgatccggacggcaagcgcgtcggaagcggcggcgcgactttaaatgtgctgcggtatatccgggagcatgcggcgggtaagcagagtccggctgccgtgctgcatagcgcagtgcagggtgacggcgcagtggagagtagtcagtttgtgtctgcgcagcccggcgaagcagcttgccacgcctttgacggcaagcgcattctggtcatccattccggcggggacagtaagcgcgtgccccagtattctgcctgcggcaagctcttttcccccgtgccgcggattcttccaaacggccgcagatcgacgctgttcgacgaatttatgattgccatgtgcggtgttgcggcgcggatgaacgccggaatgcttgtctgctccggggatgtgctgctgctgtttaacccgctgcagatcgatttttacggaaaaggcgctgcggcgctgtcgatcaaggagcctgcagaaatcggcaaaaaccacggtgtatacagacgggacagggaaggaaacgtcggcggatttttacataaaaagaccgtagagcagctgcacgaaatgggtgcggtggacgagcacgggtatgtggatattgacaccggcgcggttatgatgagcgtagacctgctcaattccctttacagtctgatcgacacagaggaaaagtttgccgcctgtgtcaacgaacaggcgcggctttcgttttatgcggactttctgtatccactggcgtcggattccaccctggagcagtattatcaagagacgcccgagggtgagtttacaccggagctgagagcctgccgggaaaaaatctgggcggcgctgcatccttatcagatgaagctgatccggatgtcaccggcggcatttatccattttgggacgacccgggagctgctgcatctgatgacggaggggatggagcaatttacgcatctgggctggcaggcgcggatcaacaccaacagtcaggaaaaaagctatggggctggaaacagctatatcagtctgcgtgcagacgttggcgcgggaagctatatcgaggacagctatttgcatcatggtacggttgtcggggagcgctgcgtgatctccggcgtgacgctggatggacagagcgttccggcggatacggtactgcatgggctaaagctgcaggatggcaggtttgttgtccggatgtacggcgtttgcgacaatccgaaggaagcggcattatttggaaaaaagatcggcgaaccgttgtggacggcggcagtttatccgattcgaaatacgattcaggaagcagtatctgcgacactgcgtgcatatgaagacggttttccaacactgaaagacgggatttctttaaaagacagcttcaaccaggcggatgtgacggcgattctgccctggcaggataaactggaggataaggtaaaaatcgaatccctgttggaggccatcgataaaaaggataacctccatgaggcggtgaaggtgttcaacggggagatcaatgcgcgtgtaatccggcagctttgcggtctggcggaaaagctggacgaacaggagctgtttgaattttcccggaaaatccggatttattatgcgctatcctgtctgacgaagcaggataagtatcttgacctgtgcctggatacgatccgaaacgcgattcttgtcggggcggtggctgggctttcctacgatccgacggctaaaatggagcaggaggaagtggtggtacgcctgcccgtgcgcgtcaactggggcggcggctggagcgatacgcctccatattgcatggagcacggcggaacggtgctgaatgcggcggtgaagctggacggacagaatcctgtcgaggcagttgtgaaaaagattccgggcaatcagatcgtgctggccagcgcggacagcggcgcagagcaggcattttctgaaatcagtcagctgcaggattccagcaatccttacgatccctttgctctgcataaggcggcgttgatcgcctgcggcatcattccgtaccgggagcagatttctgtcgaagaggtgacaaaaaatctcggcagcgggctctatttgtccacacaggtgattcatatcccgagaggcagcggcctcggtacgtcctcgattcttgcgggcgcatgtgtcaaggcgatttaccggatgctcggaaaggagctgtcccaggaggagctgtacaaccgggtcctgtgcatggagcagattatgtccacgggcggaggctggcaggaccaggtgggcgggcttgcgcctggaatcaaaatggtgaccagcgatgcagcgattgtacaggaaatcggctgcagtccatgcagcatcagcacagagacgctgcaggagttaaacgagcgattctgcctgatttattccggacagcgcaggcttgcaagaaacctgctgcgcgatattgtaagccgctatgtgagcggtaacccggatacggtggaggtgctttatgagatccagcggatagcggttttgatgcgctttgagctggaaaagggaaatgtagacggctttgcacagctcctgaaccagcactgggagctttccagacggctggatggcggctgtaccaatacctgtattgatatgatctttagttccgtggaggatctgatcgacggaaagatgatctgcggcgcaggcggcggaggttttttacaggttatcctgaaaaaaggcgtgactgcggaacaggtgcagaagcgtctgagagaggtattccaggacagcggcgtggaggtatggcgctgcagcctggtgtga

SEQ ID NO: 542 - DNA, 7403 bp, unidentified
  source 1..7403: mol_type = unassigned DNA
ttattttatggcatcgagtgcgtttgagatatctgcaatcaaatccaccttgtcctcaagacctaagcttattctgataagctctgccggcactcctgcttccttaagctgctcatcattcatctgacgatgcgtgcttgttgccggatttaagcagcaggttctcgcatctgccacatgtgtctcgattgcaccaagctttaatgccttcataaatgcagacgctgcctctctgccgccctttaagccaaatgatacgactccgcagcctccgtttggaagatacttctgtgctctctcatagtatttgtttgaaggaagccctgagtagtttacataggcaacctttggatgattttccaaaaattcagccactgcctgtccattttccacatgctttggcatacgcacatgaagtgactcaaggccaagattcagcataaatgcattctgtggtgactgcatagaaccaaaatcgcgcataagctgtgctgtacatttagtgatgaacgcaccttccttgccgaatttctctgcatatgttatgccatgatagctgtcatcaggtgtgcacagtcccggatatttatctgcatgtgccatccagtcgaatttgccgctgtctacgattgctccgccgagtgtggctccgtgtccgtccatgtactttgtggtagagtgtgtgacaatatctgcgccccactcaattggtctgcagtttacaggtgtagggaaggtattgtccactataagcggtactccgtgctcgtgtgccacctttgcaaaaagctctatatcaagcaccgtaagcgcaggattggcaatagtctcaccaaacataagctttgtgttcggtctgaatgctgcattcagttcctcctctgtagcatcaggagatacgaatgtagctgtaatacccatctttgccatagttaccgcgatgaggttgaaggtgcctccatagatggatgatgatgccacgatatggtctccgcactcacatatgttgaacatggcatagaaattggctgcctgtcctgatgatgtgagcatggcagcagtgccaccctccatagctgcgatttttcttgctaccgtgtcacaggtcggattctgcagtctgctgtagaaatagccctctgcctcaaggtcaaaaagctttcccatgtcctcgcttgtgtcatatttgaatgtagttgactgaataatcggaatctgtctcggctctccgtttccggctgcatagcctgcctgtacacactttgtacctatactgtattctttcattgtgcttctcctttattatgttaatgtttcagttggatatagtatattacatttggcgcgttttgacaaattcagattatataacttttatcatcataaattcttaagctttataacatattgtatctaccagtgcttcatagctgctgtcatcagcttgcagtatctctctgacattgtgctgctctaatgctgctgttgttttttcacctatcgagtatgctgtttccacgtatgcattctccggcagcatatgaaaaaatctttccacatttgatgcgcttgtaaaaaccgcttcacttaccatttttccaatgctttcaggaatactctcatatgcctgctcatttacatatgcatcaattttttctaattcacatatttctttaagccctgcctcaatgtcaggtgaagcctcctttgccgagaaaatgcagactttgatttcatcattatcgcccatatacgaactcaattctcctgcaagtccttttccggtctgttctgccggaataatatctgcctttatgtgatgctttgcaagctctttttctgtagcttttcccaccactgcaaaccttgcacttgctataagcctgatgtcagcccctgccagatccagattatagaaaaatgatcttacaccatttttgcttgtaaaaacaatccagtctgccgatcttaccttatcggcaaattcaggaattataactggtttaattatgcctgtcttaaccggtgtgacatctgctccaagctgctgtaattttgctatcaattcgtttgttttgatatacggtactgtgatttttcttccaaacagcggtcttttttcaaagaaatcaagcctgtcattcagtgaaaccacatctcccacaacgattatagccggtgatgtcagctttgcttcctcaatcttttctccgatatccgcaagcgttcctatacatttgcgctgcgcggcaagtgtgccgttcgatatcactgctgccggagtatccgctcttcgtcctgctttcataagccctgctacaatgctttttacatgcgcgagacccatcaaaaatacgcaggtgattgtctcatctgtaagaagggaatagtctatatctgtctcctcatcctttctgctgtgcgcagtgatgacctgaaagccttttgctatacctctgtgtgtgataggtattcctgcagccgcaagcgctgcaaccgacgaactgacacccggtaccacttctacctccacatttctatctaccaggtagagagcttcctctccgcctcttccaaagacatacggatctccgccctttaaacggactacaagctcatgatattttgatttctcgtacaaaagctcgtttatggcatcctgcttcatgacatgcttgtgattttccttgcccacataaataagctcacagcctgcctttaccattgaaagaaactctggtgatgacagcctgtcatacaccagacaatccgcctgttttatatatttttctccttttaaagtgagcaggcccgtatctcccggtcctgctccaactaatactacttttcctgtgttttctctcatgattttcctaattatttttctactgaattattatgattaaaaattatgacttgatatttttagtcgatttctaatttataccgaatatcgtgcaccgcacgctccacaatatcgtttctgtctgatgtcatatcccatacctgctctgtcctggcaagctgttttccatcctctgaaccaaacatcgcaagaagctttagcctgttatttttgttgctgtcattaccgcggtctttttcacttacaatatcacagtatgcagccacaggcagatgacagtttccaccgattcgctttaaaaattctctctcaatgcctgcgcacagattggttttctcatctgacaaagcatcaagctttgccatcagcttagcattgtcagcacgtagctcaagcgcaagtgtgccctgtgccggagccggaatcatatcatcctctgaaaagtactgtgtgatctcagaatctcttccgatacgctttattcccgccgctgcaagtacgattccatccagtctatattcgttatacttattctgtttttcgttagctatctcattgttatttacagtattatcggcaacctcttcatatataatttcactatcatatagcttacgaagcctcgtatcgatatttccgcgtatgccaaccaccttaatgtcaggacgcagctttaaaagctgatactttctgcgcttacttccggttcctatcacggcaccataaggaagctcatccagtgaagcggcattttttagcaccaaaacatcccttggatcttcacgcttccatgcctttgcaaatgtaagccctactgccggttcatcaggcatatccttcatagaatggactgccatatgaatctttcccgataaaagctcgtcctctatctcctttacgaagataccctttgagccaatcttatcgagtgcctttttctgctctaaatcgcctgttgtctttatgataacagccttaaaatcatcatccggatatgctctttttaacttatctatcacgtaatcagtctgaacaagagcaagctttgagcctctcgttcctattaaatacctcattttactctcctacggatcatgccattttccatttatcatttataaatgaacaacaacttaaaatctgtaataccatactttaaactatatttccggaattcttccattatcaatagctgcacacaatatttctttaaacacacgctttctctcggcttccgtgtcatattgcgctattactttttcgcggatctgtcccatgtattcattcagttcaccaagaaacggagtaagaatctcctgctctttgcctttcagatactgagtcagcacagggctgtttcctccgctcgaaaatgccgcaacaagattcttttcctttatgtatgacggaaaaataaagctgcaatcagccttctgatcgaccgcatttaccatgatgtccttagctttacaatactctgcaatctcatgatttaaagcattgtcatcagtggcagcgataaccatttccatgccgtcacagtcttttcgttcaaactttctttttatgaacgtaattctatctgctgcatccgagtccgtctgattgttttctttatttgccgtatatgagcccgttttatcctcgcttgctatatcatcaattgtaagctttctcagctcatcacatatatcctctgccacaaccgtgaccttcgcgccaaaatccagcattacgatcaccttgcggtatgccacatttccaccgccgacgatcagacactctctttccgtcatatccacaaacatcggaaaatacgccatttttatctccctgtaataccatatccatactttatttcatacattatttcatgccttattttatactttattatactctttatgctttattttccaccttattcttcacactgtaaccgtttaatattcctgcaaaaacaggatgaagtttggctgaaaacactgctgccgatacgcatagtataaagtccggtgcaacagttatcagacagtaatccactattactatgccccagctgacaggtgttgccgcatagaaattcttcatgcagtaaaagtatatcgctccaactgtataatatgccaccagtccgaccgttgccggaagaatgagtgtaaacgcattggtctttttaagcttttctgagattgctccgattaaaaatgctgcaagcacaaagcctaagaggaatccaaagcccggtcttaaaatgtatgtaggaccaccgcctgctgcaaatacaggcactcccaccagtcctatgcacagatacactatcacgctaatcggtgccagctttgcccccagcaggaatcccgccatcagcacaaaaaaccactgtaatgtaaaatgcatggtgtacataggaagcggaatatcaatcttgataaatgctccaactgctataagcgccgcaaaaagtgcacatgttgtaagttccttcgtttttaatttcattttcgcacgctctttcgttttattaaatatacatgctataataacatctttctctaaaaaagaaaagccatcttcgatgaagctgacttttctttgcagctttcgctgcgactcaaaacattaacatatgatttagaagtaatattcatcagaatatattcgtaaatcctctttcgtgacctgtccaccctcgatatgaaacgagttgattacaggattttctgccataagcgacattatcatgtagctcgcatttggatcgtatgcaagctttatatcctcatccgatggccttgaagggctagacggatgtgaatgccagttgccaagcggcttaaggccgtttgctctcatgtcctttatggctgccagctgctcctttggatccattgtgaaatggtcctcggcatggtctgtattcgtcaggtaatatacctttgtgatgagacgaccgttttcatcctcactgcctgctatcagaccgcacgcctcctccagcagatgctctttagcatattttgctatttcatccagaaacggatatttcattcttatgatactcatatcgttcctttccttactgtctttttattcctgtgtacgaggtgcatcaaatctgcccgctgtctcctcgcagacctcctgctcgtagtcgattggctcgagaatggtcggatggtcaccacagactgcacagttgtgtgtatcctttggaagcttaatcttgtggaactccatggtgagtgcatcatatgtaagcagatatcctgtgagcagctctccaacaccgattaaatacttgatagcctccatagcctgaagcgaaccgattactccgcccatagctccgataacgcctgcctgcttacatgtaggcactgcatcctttggtggcggattcttgaatacacatctgtagcaaggtccctctcccggcacatatgtcatgagctgacccttgaaacggatgattcctgcatgtgaaaacggctttttctcaagcacacatgcatcgttgattaagaactttgccgggaaattgtcagttccatcgatgatgaaatcatattccctgataagctctctgatatttgacgcatctacaaacatacggtatgtattgacctgaacgtccgggttcatggcgttcattgtctcttttgctgactttaccttggctgttcccacatcggctgttccgtggataatctgtctctgcaggttggataaatctacctcatccgcatccacaataccgattgtgccaactcctgctgctgcaagatacatggctgccggagctccgagtccgccggcaccgataataagcaccttgccctttaataatttcttctgacctttaacgcccacctcattaaggataatgtggcgtgaatagcgctcgatctgctcatcagtcattgccattagcatccacctcccatgaaataaaggaactctacattgtcgccatccttaagcactgtctttggcttatcctctgtggcaacaaattcctcatttattgaaactgttacatactcaggcatatctacattctcaagctcgataagctccggtaatgtaagtccatccttatattctttcttctctcctgctactgtgatagtcattttatttcctcctgtgtcacagattgtggtatctgtaagtgttattatcctgtatcagactgctttatataataatctaaaaactataataattcttcaacccacgccttcaaatcggcaggcttttgtgcgccgacctttctgtctaagacctctgcgtcttttacgaaaagcagtgtcggattcgcagtcacctcatactcatcagcgagctctccgtcaaagtttgtgttgaccttgtatacgtgaagcttatcctcataatcatcctcgatatctccgagaaccggtgccagcttcttgcaggccacacatgaatccgagtaaaaatcaacaattaccggaagcttgctttttaatactttttcatcgaaatccgcctttgaaattcttgctgccat

SEQ ID NO: 543 - DNA, 6260 bp, unidentified
  source 1..6260: mol_type = unassigned DNA
ttacttcgcagccttggcggccttgatggcctcgatcagcatgggggtgaccttgaacaggtcgccgcagatgccgtagtcggcaatctcgaagatgggcgcagtgtcgttcttgttcaccgcgatgatgcactcggagtcctgcataccggccttgtgctgaatggcgccggagatgcccagggcgatgtacaccttcggatgcaccgtcttgccggtctggcccacctgatggtcggcagacagccagccggagtcgatggtggcacgggagccgcccacgacgccacccaggacgtccgccagctcctcagccagcttgatgccgccctcgacatccttgctgatgccgcggcccacagacacgatgtagtccgcgccgatcaggtccaccagcttcttggcggccttcacgacctccacaacctcggtgttcaggtcgctctcgctcagctggaagctgggcttcacgatctcgcacgcatccgccttggcctggtcgaagacgttcttcttcatcacgccggggcgcaccgtcgccatgcagggacggaaccgcgggcagatgatggtggccatcaggtggccgccgaaagccggacgggtcatcttcaggttccggtcctccatatcccacttctggctgtccacgtccagggtgctggactcacgcaggaactggatgtagttcgccacatccacgtccaggtgggtgcagtcggcgcacaggccggtatgcagacgggccgcacagcggggacccaggtcacggccgatgttggtggcgccgatcaggaacgcctcgggcttcagatcctcgatcacgtcgcagatgaccttggcataggcatcggtgttgtagacggccagcagggggctctcgcacaccagcaccttgtcggcgccgtagccgcccagctccttggcggcggactcgatgccctcgccgcccagcagcaggccgcacaggttcacgcccagctcgtcggccaggtcgcggcccttggagatcagctcaaagtcggtgggcatcagtttgccctcgcgctgctcgcagaagacccacacatccttgaaagcagcgatatcagcgctattgaaattggacattgttcaaatactcccttctcagatgatgtgcttggcggccagaatggaagccagctcctcgcaggtctctttgccggcaccctccagcatcttgccggcgcccttctggggcggggtgaagctcttgaagatgttggtgggagagcccttcaggccgatggtggtggcgtcgatcaggggatcgtccttcagcgcctcatagtcgtaggtggtcatgggcttgccgtaagcctcgaacacaccgcccacgctcatgtagcggggatcgttcagctccttgatgcaggtgatcagacagggagtcttgaccttgatggtcatgtagccgtcctccagcatccgcttgacggtgatggtgtcgccgtccttctggatgtcggcggcgtaggtcacctggggcagatgcagcttctcggcaatctggggacccacctgggcagtgtcgccatcgatggcctgccggccgcacatgacgatgtcgtcagcctctacgccgatcttgttgatggcggcagccaggatctgagaagtggcgtatgtatcggaaccgccgaactcgcgggcggacaccagcacggcctcgtcagcgcccatagccagtgcctcgcggagcataccggcagcgggaggcggacccatggtcaccacaacaaccttgcagccggtggcgtccttgatcttcagggccgcctccagggcgttcatatcgtcggggttggtgatggtctgcatggacgcacggttcagggtgccgtccggattcaccgccaccttaccggaggtgtcgggaacctgcttgatggaaacaatgattttcatgttaacctttacctcctattttacttcacgcccaggcggctggaaataaccatccgctggacttcgctggtaccctcgtagatctcggtgatcttggcgtcgcgcatcatgcgctccacgggatactcgcgggtgtagccgtagccgccgaacagctggacggcgcggcgcgtgacatcggaggcagcctcagcggcgaacagcttcgccatggaggcgtccatggaatagtcctcgtgattctgcttcttcatggcagcagcatacaccaggtactgagcagcctgcatccgggtgtgcatgtcggccagctggaactgagtgttctggaactggctcaggcgcttgccgaactggacacgctcctgcgtgtacttgacagcctcgttgacagcgccctcgcccaggcccagggcctgcgcggcgatgccgatccggccgccgtccagggtctgcatggcgatcttgaagcccttgccctctttgcccagcagattctccttgggaacgatgcagtcctcaaagatcaggtcgcaggtggaggagccgcggatgcccatcttcttctcgtgcttgccggtggagaagccggggaagtccttctccacgatgaaggcagagatgccgtggttgcccttggacttgtcagtcatggcgaacaccacaaaggtatcggccacgttgccgttggtgatgaagcacttggagccgttgaggacgtagtggtcgccctccagcaccgccagggtctgctggccggaggcgtcggtgccggcgttgggctcggtcaggccgaaggcaccgatcttcttgccggagagcaggtcgggcagatacttccgcttctgctcctcggtgccgtgctcaaagatgggggcgcagcacagggaagtgtgggcagaaacgataacagcagtggtgccgcagaccttggccagctcctccacgcacatggcgtaggacagaacgtcgccgccggcgccgccgtactccttggggaagtaaatacccatcatccccagcttggccatcttttcgacggtctccatggggaaccgctcctcttcgtcgatctcctcagccagaggcttcacttcgttctcggcgaattcacggtacatcttccggagcatctgctgctcgtttgtcagatgaaaatccatataccattaactccttttcttgttggtgctgacttcaattacttggaataatcatagaagcccttgccggtcttcttgcccagcaggccgccgcggaccatcttgcgcagcagcagcgcgggacggtacttggagtcgccagtctcattgtacagggtctccataatggccaagcacacgtccaggccgatgaagtcgcccagagccagggggcccatgggatggttggcgcccagctgcatggccttgtcgatgtcggccacggaggcgacgccggtctctaccaggccgatggcctcatttatcatggggatcaggatcttgttgaccacgaaaccgggggcctcagccacttcgacgggctccttgccgatctcctgggacagcttatagacgaaatcgaaggtctcctgggtggtgttggcgccgcggatgatctccaccagcttcatgctgggcacgggattgaagaagtgcataccgatgacggggtgcttcagaccgttgcccatctcggtgatagacagagaagaggtgttggaggcgaagatggcctcgggcttgcacaggctgtccagctcattcagcagctccttcttggtagccatgtcttccttgacgcactcgatgatgagatccgcgtcggcgcaggcggacttctcctccaccagcacgttggccagcagggcgtccacagcctcctgggtcatcttgcccttctccacccgcttctgcagggaagcagccagcttatccttgtgcttctgcgcggaagcgacggagctggcatacatcagggcggtgtggccctttgccgcgaaaacctgcgcaatgccgctgcccatggtacctgcgccaaaaactgcaaccttcatgatttttcctcctgttatttttgaataaattgtttggtttccttgtttcatgcctttcggcactccagggggccgggctgtgccgcccctccgggagaacacagagtcattccgatattgccaatttactcacaaactttattatagggtgactggcggcatttatcaagtataatttgtgcagtttgcgaaaaatttcacgttttttacacttcatacaaattgttcgttaaactttatacaattttgttaatgcattcacaaggcccttcgttccagttgtatctgccggaaatctcacagcctctcggccgcctcgcaccggagccaaaatgccaggatctcctccttagccgcctccgcccgggaaagaatggcagggtgcccaccggatgcaaacaagcgcacggcggcatggggcatctgcgccgccatcgccttgtattcctcttccaaatcctgtctgcacatggggtcctcccggctccccatcaggagcactggcggccgcatctgctccagcgggccgcagaacagcggccgtccggaggcggcgcatcgcaacagggcatccgtgtcccggtccaccaccgcctcccagtccggtccctggcaccatgcataaaattcccgggctgcctcgtctcttttggcgcggtcccgctctgctgtcaaatcccgcgcaaaccccgggtgaaggctccgcccgtcaaagctgtccgccactacggcgcctactgcgccgggtgccagcagagccgcgttcatggcggcccaggcgccgccgctggttcccagcagacagggcctctcatagcccgccgcccggatcagggccagggcctgccgggcctcttcctgccacaggtccgccggaaacgactccacccggtcggagcgcccgtttcccagaaagtccagcagcacacaccggaaatgaggcgtatagagtggaagcaacggctcaaacagccgggatgaggcggtattgccatggagaaaaatcaggaccgggccctcgcccgcctcctgataaaacatgcttctgccgcagtagggcaccttgggcacatcgctcccccctcccatttgggctatcatatcatctctttgctttccgcgcaagcaggaaatccacgctgccatttacagcgccgggtctgtatggtacaatagcattctgaatgtacggaggactccccggcggggtcttcctgaaatcggatcgggaaccgacccaggaggatgttgacacatgcggatgcgaaagaaaaagaatctgatcccccggatggagcgctgcggcgaccgcctgatccgggagccctactccatgccgggcaagtggcgggagctgatgccccaggcccgggagctgcggctggagctgggctgcggcaagggccgcttcaccgccggcacagcggcggcggagccggacgtgctgttcatcgctgtggagcgggtgccggatgccatggtcatggccatggagcggtgtgcggcccaggggctcaccaacgtgttcttcatcgacgccaatgctgaccagctgcccctgttctttgccccgggagaggcggaccgggtctatatcaatttctgcgatccctggcccagcaaccgccacgccaagcgccgcctgacccacggcaacttcctgcggctgtaccgccaggtgctgaagatgggcgggcagatccacttcaagacggacaatcaggacctcttcaccttctccgtggaggagctgcctctgttcggctttgagctgtccgaggtcacccgggacctccatgcgaatggcccggtgggcgtcatgacggactacgaggccaagttccatgagcaggggctgcccatctgtcggtgtgtggccaccatggttccctgggaggaacccttccccaccgacattcggcgggtgaagaaccgctggctggacgtttttgccgacggcgtgtccgacgcggagttggggaggcatgtgctgtcggatgggaattacctgtggcatctcttctcctggaacctggtgccctgcctgtccggcgacgcggcccggcaggctctgtcggaggcatccggtaagaaatacctcttttattatgaagagccgccggagggtgagcctctggtgcggccggtgacggcggaggagctggttaccctgcccgcagatgcacgcgccattcccggagcggactggtatgtggtagacaaggatttcacctggacgtttgcgcagacccatgaggcggactgcgggccgtacttctgtcggaaagcctga

SEQ ID NO: 544 - DNA, 17665 bp, unidentified
  source 1..17665: mol_type = unassigned DNA
tcacctcttcgtctgaatcccatacaggtccattttctcgtacagcgtgctccggcttatgcccagcagtctggcggcctctttccgattatgcccggccttttccaaagcctggcatatccgcttcttttccatgcattcccctttcaaggcaatgtcaggatcggaaggctttccggactcatccaagttcaattcttccgccgtcaccaattccccttgggcaaaaagcacggcggattggaccgcctgtttcagttcccgtacgtttcccggccagtcatgggccagcaaccgtttcttcgcctccgcatcgaaaccttttacctgtctgccatgctcttggttgtaaagttcccggaagaattcagcaagcggcaggatgtcttccgggcattccctgagcgggggtactttcacggtgtactcactcaatcggaaatacaggtcccggcggaaacgcctttccgatatggcttcttccagattctcgttcgttgcggtgatgatgcgcacgttggctttcctgtcttttgtgccgccgacaggacggtaacgcctgtcctgtatggcgcagagcagcatctgctgtacgccgaggggaaggttgcctatctcatccaggaacaacgttcctccctcggcttccgaccaatagccttccttgcgcccgaccgccccggtaaaagcccctttttcatgcccaaacaaggcggaagcggccagactttcggataacagcccgcagtccactgtcacgaacggtttgtccgcacggtcgctttgggcatgtatcttttcagcgatatgtttctttcctgtaccgttctcaccccgaaccatcacgcagatgtcggctttggctaggacgtggagacgtccgaatactttctggtaggcttcgctctcccttatgaacaggggttcctcatggaatgactgccttttctgcaagtcttggagcatggcgggaagctggctggtcagcagtttcttggggatatagtcttccgctccggatttcatggaacgcacggcggtaggcacttccgcataatccgtcatgatgacgtagggattgtgcttcccctcgcggcgcagttcttcaagcaacaggatgccgtcaccgtcaggcaaccggaggtcggcaagcacgatgtcgtcatcttccagcattgaaaacagtttccgggcaccggtgcaatcggaggtactgactgtccggtatccgttttcttccaaaaaattgcagacatacctgctgtacacaaggttgtcttccactacgattatctttcccatttcttcatctcctttctggcggcttctatgatggtttctccttgttccaacacggcacgggctgcataggcgacttcttcgtccgagtacggttccttgtggatggcttcgtgcaacttctgcaaggggcgttccgtccgtatcaccatccatgagctcctcaaatggtgtacccagctgttcaaggctgtcaagtctttcctttcggatgccttccggacttcctctatctctttctccgtttcggcaatcagctgctccaatgttttccgcttgtcgccgaaagccaacagggcggagaagtccggctgccggttccctctttcacggatgcagtgccgtgtcgcctccatcagttcgtctatggaaaacggcttgggaagcaatccggaaaatccggcttctttcagttcctcctccgatacatagccggccgcagtagctgccacgatgggaagttcacgggaattgccgatgtcggacatgcgcagcagttccagaatctcgtagccgttcgcttccggcattctcaagtctgttatcaacaggtcataatccttgctccgtatcctgtcggtcagctcggccaacgtaaggcagttgtcgcatgaaacgccacattgaaggtacatctcgcgcatcaggcggagcgtcaccgggtcgttgtctatggccagcacggaacatccggccagtgaaggacggacatccattgacttctcttcttccggtacttcttcggctttcggcagcggcaggacaacggtgaagcggcttcctatgccaggtttgctctgtacggaagcagaaccctgcatcagctgtacgagattggtcacaatggcaaggcccagcccgaagccgtcctgagtcacagcattgcccagacgttcgaagggggcgaaaatctgttcctgcttttcttccgggatgcccgtcccggtatcctgcacgtacaggatgaagttgccgtccttatagtccgtgcagagtgtaatgcgaccgctgcgggtaaacttgaccgcattggagagcaggttgcttccgatgcgcaatatgcgctccttatcgcctcccagcacttctgtcgtctggttgtcagtcacgaattcgattcctttggcttcagccaaaggggcgaactccgtttccaacacagttgctattgactcggagcggaatggacggatatgcagcttttctttatggatctccagcctgaaaaattccagcagctcggtggtcatggaagccatgcggctggcagattcacgcacggttaatatgtggcgtacccggtcttccagggcttcatcccggagcaggagttctgcattgccgcttatcgccgtcagggccgtgcgcatttcatggctgacagtctgcatcaggttgtgacggaattgcagcaattgccggttcttctcattgctcgcctgcaattcgccgataagttcttcgcgtttctttttttcgccatgattgcggcggatttcccggtggatggcgatgtggaacaggattaaaaggaggatggcggtggacaaggtagaggtgagcaggagcgtggaacggctttgcgcttccattatcttatgctcacgctgaaagaaggcttcctgcacttgcctgtccagattcttgatgaggtggttcagccgggcgttcaatgccagattgcgggcgtacaggctgtcggcactggtttccatatcctccgtcccttcctgctgcatggcaatcaggctgtcactgaatgcgtgcagttctccggcggaaggcaaaacccggacggttttcttggcgcccaacgctcccagtatattgtcccttcttttcctcacggtgcgtatgcgggtggcacgttccgccactttgggcagatggtggacaagcagactgtcagcagcatcctgtatcccgatggcttccacgacacggaacaagtgcatttccttgtcggcaagcaggtgccggagcgtgtctatctgttcgggacgtacatgctgcctgcaccggggcttcaaggccagcagcaggctgtctgtggacagccgtttctggcgatagtttgccgtatctgcattttcttggctgatcaggctctcgcccagcagggaaagctcggtgatgtgaaggtgtgcggcatggatgtcattccgtaccgattgcaggtcatgcacttcgaaatctatctcccgcatccggctacgctcacgaaagaggataaccaccattccgactatggcggccagcaacaggaagttcccggcatatatcttttgtgtcaaggatactttcattgctagtcatattatccgtagtgcattctctcatcagaatgtgctacctcgtttatgggcaaaaatagaaattatcaaccacaatccatgcgaccggttcagagtttatgaataattatttttttagaacgattcaaaacaaattgagccgcaccatgacgggtgtttgattgtaaaatagtcattgggattatgcaagcgtaacgcaggcatccgaacgaacggatattacaacatccggcaagagtgcagacaatgcaaaatgcacagagagtctgatagacaatgcaactacttgcatacaggtacaacaaaacaatggcgactacaacatttgggttcatagttgcagtcgccatttcacatgcaaaggttgtacctgtggttcccgaaaacttacgatttctttcctgcttcggatacagctacaaaaatagccgtcctgattccgggcggctattataactacttgcaggtaattgcagacagtgctttttaatatatctgtctacaaggtgagaaacaacaatcaattgtcactcgtccctccattatggtttctgttgtaagaggttgtcacgactgccacatcaccgtattgtcttccactgacggaacggttcaatgcggagacggtcaaagtggtcacttgttgagtacctgccacgtgcaaggccgtaccgacgggcaaggtcacattgatggggtaagttcccgtagccgtagtgacacctgcgccggcaatgcgggccagaatctcaatcaggtaagcggttatccgactggtcccggacgaagtgatttccgttccgatgtgataagtgaacgaggccgaaccaacggtcatgtcacccgatccatacaggttgtcccacaggtcttgttcaaaggccaacggcgtgcttgtggaggaagaagtcacatccgctccaaagagcaacgtataggaagtgaactggtcggcaaacacgattacttgtccgccttctacagtatattctgcatccacccattgcccgttcacgtatttctgtgccgtgatggattgcgccacttccgcatccacatcgtaagccaattcgatgggacttgaaagcgtggcgttcgcatcggtgcaagccacgcttgtaccaatcagcatgacgctttcggcagcacgggaagtggcacgggtattggcttcggcttcatccagcgtgtaaagcggggtaaccacgatggaacttcccgcaggcaattccgccgtctcgggtacggtgacagccactgtgaccgcgccctcgtcattgccttcgatggtctctgaagtcacgttggcctccgtatcgccgttggcggctacttcaatggtcgtgccttcattgggcaatgacacgttccatacgacattggctccgcttccgctttctgcaacggtgacggttgtttccttggactgtttccccggagcggaagccgtcagggtataacttccggcatccacatcgtcaaaagtgaacgtgccatctgcgccggtctgtgtcgattcgccgttcatgctcacggtagccgaaaggccgttgccgtccatgccggtgacacgcccgctgatactgtgcgatacggacaccgtgggcggcgtcacgttgctgtaatccggatcatcgtcactgcaccctacgaaactggtgcacaaagccacactaaggaatgcgaacattccccatcttgatagatttctaagattttccatttctaaaaataattaaacgattaaattaggttattttgaaattctgtattctagtagttatatccgtattgtttgtgtcttcaatcagggtgggtcttgcccaacaggtttaacttgaaacacaggccacctgtgaaatgtttcccattctgcaaggttgcctgcaaaaagaggtgtttccacaacaaacagtctgcgccgatgttgatatcgtcaccggtatattctatcgttgcccgaaggtttctggcaaaggacgggcgataggtgataccggcggctatgccccgccatttggcattgaaatccgatgtaaaatagcggtaggtcaaatgaaaaccaaattcattccgcctgtacatgacgtgtttgctggcggctatataataattctggaagtagtcgttgaccggatatttgccttcggcataggactcgttcaccttgctgccgggatcctgggtgcctatggcaattgcaggccaccatttgccttctttcagcggacgcactttcaggtgaaagtaccggtctttcttattatgtccgacatggccatcgttgtcaatccccttcagtatggtacagacatacgctatttctatccaagggaagggggtgatggccagaaaatggttggtcgtgttgaatttctctccttcatactggtaggtgtcaggaagaaattcctgattcaggaagaagaaaccgatacgggcttctccctctgtcgccatttccgccgtgggcacgtggatcatgccggtaacgcccgaatactcttgcgccctcaatatcggaatgcagcccatcacgacaaggaggccaatcaataatcttctcatttccgccctccttccttttccgagaagtccggcttcatggtgttgctgccccattgcagggcattgcggtcaaaccagccctcgcgttcgttctcctccgggtcggtcgtgtacattttgttggcataggcgtcaccttccatactgtatgtcaggcggaaattagaagccggacggaaattgacagtgcgccgtttccgcttgtaaggcggtatcatcatcaccaccttaaaaccggcattcttgccgccctcgttgctatactcgccgtacaatccgaccgtacagtggttgaaatgccgcatggcttcaactatggctccataatcttcatagaggaaacgtccgccccttgcgcggaactgcgtattccatttgttcagatagacatcggtgcccagcaaggcggtaatccgtttgggggtacttgcttcccagtccactgccattgaacaatagccggttaatccagcctgcacttccaatgccaaccagcggtttacgacatacatccctttcaagtccaatccataccgctccctgccgaacaagccgccgcttgctttcaggaaccaccgggatcgccaatgcgcctctttagataacaccgccatgttcaaccgtactttcttgtatcggtcgccatagtcgttatacaccggcactaatgcctgtgctgccgcctgccaccccttgcccatgttccatttcacaccgggagtcagattcagcaaaatctcatatattttcccattgtgaaacaaatcccggtagttgaaatccgcccctacaaatatatctacctgaccagcgggtatggacggctgtgcaattatggatgaatacccataaaagaccagcatgaatagcaaaatgaacagtttcttgcttattctctcgtaagctttcattttttcatatacgctcgtaattgttttattgttaattgatgtcatagttcatatcccggtcatctttcatctgataccttttaccacattttctacgaaacgcaagtttctcttcatccttttaacccaatgtgagccatcctgattttactctaagatggctcacattgaaacgacactcgcacaaagtgcctttcagtctttcaccagaaaagaggtgaaaggtttatttttcccaatcatttattcacactttcattagtccaaatataatccttcatgataaaactttgttttagcttccaccttaggtcagtttacaaggaactacacgcagaccgtgaaacgggctgctgacaacaaacggcggtatgctcccggagagggcagcataccgcctgttttgttgtctagggtttccaaaggggtgccccctttggcacacgactttgcttgcaaagtgtagtgtgttatacctgctggcgtggctgacagaggaaacggggtgcggtgcttcttgcaccccgtttgctccggcaggaaaacaggctgaatttttgcgaatgggaatgagcaaaaaatcggcctgttttcagagaacggcggcaggtatatgaaagcccccgtccctcgtccttcgctccgacttgtggacaaagtgtcccgaagtgtggccacactcccggaaaagtagcaggacagcaggcaaccgtcaaggctgaaatgaacgggtttgcacccggccttgaccgccgcccgccgttccgctgaatgggtgaacaaggcggccaatcctcaaagtgcttgaccgctctctttttgattttggagcatttcttttcccaaaattgaaatgggcggggaaaccattttagggctttcccgccttgattaccctttagcaaagacgggcggggctgtcaacggcggcgcatgaaatgcgccgttcatcttgaccgttgactggctcggctggctttgctatttttatcgaattgcatattggtaaattgcattgatatgtacttgggttgtattcacgattggcacattaacatcttcgggctttatggcaagtggcagctccgtacaggcgagaatgagtgcatctacattttctttttcaatgtatttatttgccagtgcaatcattttctctttatcactaggaattactatgccattctctaaattggggtatatcagttttcctaatagagatattattttttcgctatcgcctttacaagtaacatcatcgggcggcgaagttcatcttccatacccggaatatccatcatctctttaggcggttctgcttcctctacaactttaagctcaaacccattgttcagcaatcccattataatctgtgtaagtgtgtgatgttgttttactacatcacatcctaaaaaatgtgtatttcgttctcctgttataaagtaattatcaatcgcccaatattgcggtttcccatcatctgtataaatccaatcctgcccaactcctgcggtaaaaacagggtgttcgatattaaaaagaaaaattccacctggttttaatgtcctatacactttttgaaatatttccactatgtcctctatatagtgcagagctaaattagatataacacaatcccattcattttctggatagtcatattcctctaatccgctaatacgatattcaatttgatttcctgaattgcgcttttgggcttcctcaatcattttcttacttaaatcgatccctaatatttttgtagctccttgttcttctgcgaacttgcagtgccagccatatccgcaccccaagtcaagaacagattttccttctaacgaaggaaacaaaggttttaattgatgccattcaccagcagcttttaacccctctttatcaatgacaataacattcccttgtgtttcttcaagaattgctgatcgcaaactcgttttccctgaccctggttgcccaccaagtaaaaaagcggttggcgattcaaccgctttttttccttgaaccaattcttctaaattatcatttaagcgattttcaaattgtttgtcagtaaaattgactatatttgccatattaagccactttctctttattcaaaacttgttttgaatagcgattcattgaccgccaatactcatgaacggcttgtaattcttctaaagaataatcaaaaagatttacacgttttgcaagctttaattggtttaataaattgacttccaataattgagagtcatttttatttaattcatgattcaaaacatagtttaatactcgattataaacgcttgccgataattcgttaatgatctctatttcaaatgttttttcataagtaactgccatttcattttcactccttttaaagtttgtcaggtaaatatttccgaatatattcttctaaggctttatccataacttcttttacgtttccgccattctttgctgtttcgatttttataatatggtgcaagtcagcacgaacacgaaccgtcttatcccccataatatctttttttgcactgattggtgtatcatttcgttttgctttttgtgcgcctaaatttcccacaaccactcacttctttctatttcttcttactcttattttatcatcaacaatcacaaatcacaagtgatttgtgattaatcacttgtgatttgtgattctattctttttcgttttctaattgaatgattcgctcaagcatttcaaaaaatacgttctcatacatagataaaatcaatatatcccttttctccgatttttacaacggcattgtaggactttctatctttcgttttgattccttttaccagggtttcttttccctctagtaattcttttacatttgttttggtgagttttttctttctaaaatgttcagctaaagtgaaggtacattcaggataatttgaacaaccataaaacgatttttttaatacaatattgttgccacacttaggacattttcctacaaggggtcccgagcgcttagtgggaatttgtaccccttatcgatacaaattccccgtaggcgctagggacctctttagctccttggaagctgtcagtagtatacctaataatttatctacattccctttagtaacgtgtaactttccaaatttacaaaagcgactcatagaattatttcctcccgttaaataatagataactattaaaaatagacaatacttgctcataagtaacggtacttaaattgtttactttggcgtgtttcattgcttgatgaaactgatttttagtaaacagttgacgatattctcgattgacccattttgaaacaaagtacgtatatagcttccaatatttatctggaacatctgtggtatggcgggtaagttttattaagacactgtttacttttggtttaggatgaaagcattccgctggcagcttaagcaattgctgaatcgagacttgagtgtgcaagagcaaccctagtgttcggtgaatatccaaggtacccttgtagaatccttctgcaacaatcagatagatgtcagacgcatggctttcaaaaaccacttttttaataatttgtgtgcttaaatggtaaggaatactcccaacaattttatacctctgtttgttagggaattgaaactgtagaatatcttggtgaattaaagtgacacgagtattcagttttaatttttctgacgataagttgaatagatgactgtctaattcaatagacgttacctgtttacttattttagccagtttcgtcgttaaatgccctttacctgttccaatttcgtaaacggtatcggtttcttttaaattcaattgttttattatttggttgagtactttttcactcgttaaaaagttttgagaatattttatatttttgttcatgtaatcactccttcttaattacaaatttttagcatctaatttaacttcaatagactaataacaatgtttggtcttgcttcactttgtgcttgtcggaagcctaaatagtaactgcgttttgcttcgtgtccgtctggcaaccgctcaaattgttcatcaagttctgatacaccttcttcgttatagcgtggatcaaattcttctaaaaagtctgcttcctctacaactttaagctcaaacccattgttcagcaatcccattataatctgtgtaagtgtgtgatgttgttttactacatcacatcctaaaaaatgtgtatttcgttctcctgttataaagtaattatcaatcgcccaatattgcggtttcccatcatctgtataaatccaatcctgcccaactcctgcggtaaaaacagggtgttcgatattaaaaagaaaaattccacctggttttaatgtcctatacactttttgaaatatttccactatgtcctctatatagtgcagagctaaattagatataacacaatcccattcattttctggatagtcatattcctctaatccgctaatacgatattcaatttgatttcctgaattgcgcttttgggcttcctcaatcattttcttacttaaatcgatccctaatatttttgtagctccttgttcttctgcgaacttgcagtgccagccatatccgcaccccaagtcaagaacagattttccttctaacgaaggaaacaaaggttttaattgatgccattcaccagcagcttttaacccctctttactgcgggacatctttgcatattcttcaaaaaacttctcattatcgtattcattattcataaccttaacatctcctattttatccttcggcaccgccgcctccaggcggctccccaacttcatctgctcgataaatgggaattgcaccaaaacaatctaagacaacaatgctgccctacttgcgattttttcttgtactgcggaaacagtttcttgaatggaataattggtcgtatctacaacattcgattcatatattcccagattgcaaaattgctcccacattgtttctaccaattcgatatttgtttttcggtctaactttgagcgttcaacagcccgctttaaggtttcttccttacttgcccttaaaataatataatgcacctcataatgttcccgaacaagactttgccacggctttaaaaaccacggtccgataataccgtcaacaattacatcatatcccccacgagcatatcgcttcgcagcttctaaaaacgcttcaatgacaatcaaattttgctcatttgattctggcaaatgcggtggtattgcccctttactcaaataatgataaaagtcatctgtgtgcatatgcacagacttttccaaatctgattcttttgcaacagcagatgccgttgtagtttttcctgtccccggcgcacctgtgattacaataattctaccttgattcatctatattttacctccacaaattccgatttgttgataactcattatatcataaatttatccactatatcataaatctatccacttttcaatctatatcacgcaattaacttggaaaggaacaccgccgagcaatgggttatctcggcggtcactcttttactcgttgtccgctccatacgataccgacgacggaattccgttatcatttagatttttctcgatatccttcaccggaagtgaggaaaaatacgcttctcttccctcttttattataagctcgtggcacggcttgtttccggcgttgtcgggaatgcgcgcgtccattatgttcacggctatcatctcgggagtaatggcggctctccctccggcttgacctacgcacaccaccgcgtcgggtctgtattgctccaccgcttttttaagaacctctcctgcctttccaaacaccgtcggcacttcgagctttaaaatttccgcgccttgtatttcgtttttcatcatttttacggcttctcccgcaggattgattttctctcccccgaacgggtcaaagcctgtgaacagtattctcattttatcatgcctttctttgtctgtattctctcaaaatctcgcggcacctgttttgaagccactctgttgtctcagtatcgttttcgacagcgttttcgtatatttccgtcagccctatccgcagctcatagcataaaattcgctcggtatatctcggcaggtgagagtattttctctcccaatacgccgcagttttttccatgcacatgagccatgtccgccaaaaatacgcggtcgcgatgtcgtaaagaaagtccccgtaagccgcgcagtcccagtctataacgccacttatcctcgattttttgcctacgataacattattcgagccgaaatccccgtggaacagcgctctttcttccgggcaataagatataagctcacgatatgccgcgagaagctcgtcgatgagtgagaggttaacatagctcctgcttaccgccgtccagtctctctcgaatacctccgcaagatattctctccagctgtaaaacggagcgtttcccgtatcgctgtcaaacacgccgcagccggaagtgcctgatatatcggttcgcgatattgcttcggttacatccgtaatatcgccgagcagtcgcacaaccgtttcttcatcggagtcctcatatgtaatcccgtccgcttttacgctgatgcagaagtagtgcgtgccgtcaaagttgcctgtttcaacaacctctggaataggaactctatccgagcggaagtgctcataggcgtatttgtcttttttgaagccttccatatttgaatttatgcgcacgacatattctctgccgccacgcgaaaaccaatacgcctgtgactcctgcccttcttttatcggaaaaagccttatatcctcaccgtactttcggcttaaaaactctgtgatgctttcttttgaataatcgcttttcatgttccgctctctcctttagctctgtctgaggataatataccacaaaaaagcaaaaaaatctaagacaacaacgctgccctacttgcgattttttcttgtactgcggaaacagtttcttgaatggaataagtggtcgtatctataacattcgattcatatattcccagattgcaaaattgctcccacatggtttctactaattcaacatttgtttttctgtctaattttgagcgctccacagctcgcttcatagtttcttctttactggcccttaaaacaatatagtgtacttcataatcttctcgaacaagggctctccatggttctaaaaaccacggccctacaattccatctacaattacatcatatccaccgcgggcatagcgctttgcagcttctaaaaaggcttcaataacaactaaattttgttcgttggactctggtaaatgcggcggtattgctcctttgcttaaataatggaaaaagtcgtctgtgtgcatatgcacagatttatccatgttcgattcttttgcgacaatcgacgcaattgttgtctttcctgttcccggcgaacctgtaatcacaataattcttccttggttcattttcactcctcctatttcgatttgctgttctctatttctttttccgtccccgctgtgggtttggatttttcggcaagtccaacttctccgcaatctattttagccgcttcttttcttcttcaaacagtttattataccccaaaaccataaatcagcaaacgcaaaaaccgttaccaaagaaaatgccgcctgccttttttgctaaacctaaagaggctaagttagaagtggacgcactatacaaaggaatactaccatttcgtctaactgcttctgcccattctgcaagtgtgtggaatgcatacccttttcttctgtaaagttcagccgtttcaattcccgcttcctctgcctcaagaataatccgaacactacgacaaatagatacgacttgagaatcttccaaataagcagcgcaaaagggaacatccagcaactcttcaggtagccagggaaaatagtggctcatctgaggctcaatgttgtctttagtgagtaagcaggcttttaactttggctgttcaggaagccaaaaacaagcatcttctgaaatcttactttctcctaatagttgccgatattctttatcataaataggtgattcattcggcagcatcagtactggctctctgttggtaattgattgtagtttttctcttaattctttcggtacgtcagcgcgaaaataagcatgtggtttttcgtaaagtggtcttgtcaaatagaagcggggagccggctgtgaagtggagtcccatggttcccttatagtcataagttcgttcttttcattcattgtaaacagtgcttctacatgaagctgcatatagtacgagttgctttttcccattttctaatattctcctacatttatttctctgcctgttcaatcattttctttactaaccgctgaaacaggtcggcggtttcctcgtccatcggtgcaagctgtccgatctgtccggctatcatcgccgttacatcgtcaatggaaagcggtttttgtttctgttccgccagtgcgtcccgcatggcttggaacatagcggcggtcacagcttcccccggctgttccccgttgtcaatatctttcttaatatcccgcaggatagccaggatttgttgctcgatgccagggctttcaatgcccgagttggccggaagcagctggttcttgctggtggaattggtgaggtaattgcggatataccgtgccatggaaagctgcgtgttcaatgccagaatttgcgcattggtctcgctgctctgttccatatacatgctggcagcggcctgtacatcgggcagaaggtgttcgctcttgtaagaggagatgttttcatccacattgccaagttcctgctcaatcacaccgagacggtcactaatgaaagccgaggtactaactgcgatttgattcttgtcctttatccagttctcattgtaaacggctatcaccgtattcagcacatcctccgcccgttggatgcacacgtctttgaatgacagattgatgacagtggatttctcatcactcaacgtaactgacaagttggaagcatagtcgcctgtggcatcttggtatcctctgcgtgagacataaacaggtgaatcatgggtggcggaatcgttcgcaacctttacaacaagttttccgataggggcgtcaactgtgtcattcaacacagccgttatctttcctgccacatcttcaccattacgagaaaaatccgtcagaagtacttggccatcaagaccggggttaatggtaaaagccacgctctcgttgtcttgcaattcgttaaagtctaccgtgtaggggcaatctcgaccatacaagactttcttgtaaaaccctccgtccgtgtgataactgatgtccaaatgaaggcgtttcaccacatcaagcattaccgcaggagactgcaacgattgtatttcattgtttacgttggtgttggtctggaagaggtcgaagtctcccatcagaccagccgcatcacccaatgagttccctttggaatcctctttgataaggagcgatgctgaacgggtatataccggcggggtggtcaaaagatagacgacagccactccgacggtaacagccaacgatatgacgaaccaataccacttgttgagacagaggtagaacaaatcttgtatacggataaagtcatccgcctgtttaggtttggatatattgttttgagttgccacgatatacaatatttagattggacgtgattaattaaaaatgaggatggccacagaagtcagcaacgatgccagcgaaatccagaacgaggtggaacgcacgttgttgccgttgacggtagattgacgggctttcacttcattgggttccacatacaccacgtcattctgttgcagataataggcgggtgaagaatagatgtgttcgccggaagtgaggttcagtccgtacacccgttgcacatccccttcttgccgtaacaccatcaccttggaacggtttccgtagatggtcaggtcgcctgccatgctgagtgcatcgagtatggtcagcctgtcccggtcaatgctgaaacgtcccggactgttcacctcgcccaacacggatatgcagagattggcaaattccacggtcacgacagggtctttcaccaaattctcctttatcaattcgttcttgatacattcggcgatttcttcccgcttcattccggccacgtgtatcttgccaagtacaggaaaatctatcttaccgttggcatctacggtataagcggatactccttgattgcttgaagccgtcacgccatttgtccttaaagactgacccaattgcctggacacataaggcaggttgaacaagtccgtcaactgggggtcacggctgttgacgataatggaaatcttatcctccggtcggactgtaatggctttcacttcaggcaacttgatttctgtttccccgggtctcaaatcctggaaataaactacttccttggaagaaccgcacgagcccagtgtcactgtacttgcgacaatgagcaagatgtaaaatactttatttatactcat

SEQ ID NO: 545 - DNA, 6800 bp, unidentified
  source 1..6800: mol_type = unassigned DNA
atgcgtattattttctgtctgatggttttcttgttcataggaaagaacacgatgctggcacagcagctgtcctcattcgtagaatatggagcagccctgcataccggtgacaatactcctctttggcaggtcagcaaccagcaaggactcacttcgctcgacaacaatacttacatacgtggaggaatatcctacaaacaccaacttggaaaatggaagtttgaagaagcactggatttggttgcagcagccggattcagcacgacctccttcattgtacagcaggcttacgtagacatccgttacaagtggtttggattctttgccggaagccgggaacagaattctccattgctgaatcaagagctgagcagtggcggcatgacctggtcgggtaatgcgcgtcccatcccacaagtacagataggcatacccgagtatgtacagttgctaccccgtttaggcctgaaaggagaaatctcgtacggatggtttacagataacaaataccagcgggagcaagtcggagaaaaatactggtacaccaagagtatcaaataccatcataaagaagggttcctgcgtatcggtatacccaaaggaaaatggcaactggaactcggaatgaccctcgacacccaattcggaggatacaagattggaggttccgaatcgggagacttgggcaacggatggaaggattacgtacgcgtattcttccccggccacgggcgtgaggacggaccggtaggtgaacatctggctttccaaggcaattttctgggtagcgaatatatcaaaatgacttatcgtcctaaggaagatttctccatcagcgcctatctggacaatcattttgatgacttctccgccatggccaaactcaacggttgggatggcttatggggtgtggaatataaatccaaccatagacaagccatcaacggaatcgttatcgaatatctccagactaccaatatgagcggtccactgcacggtttgcaaaattctgtagtaggtaagaccggaggagccgacaactactacaacaacggttactacccaggatgggcacattggggtatggcgatagccaatccgttgatagcatcgcctatctataataaggatggcgatatgagtttcaagtacaatcgcgttaaggccctgcatctgggatggagcggcgacatcagcagtgagtggagatatgtggcaaaattgtcccacaacagaacttggggaactcctcatcgtccaatacccgatatattagaaaatttttctacttttgcatcgttttactatattccccgtaaatggaaaggctggtgcttcaacgcgtcccttgcattggatatgggagagatatatggagacaattttggattccaactgaaagtacataaaacattttaagaaaatgaactacatacaaacagagattgacggcgtatggctgattgagccgaaagtattccatgatgcccgcggatactttatggaagcatttaaggaagaagagttccgtgcacatgtcggaaacgttcacttcatccaggacaatgagtccaaatcctctttcggtgtattacgtggtcttcattaccagaagggtgattgcagccaagccaaactggtacgtgtcattaagggaaaagtgctggacgtggctgtcgacttaagaaaatcttctcccactttcggaaagtatgtcagtgtggagctaagtgaggagaacaaaagacaattcttcattccgcgtggttttgcccatggttttctggtgctgagcgatgaagctgtctttacatacaaggtagacaacgtatacgcaccacaatctgaggcatccatccgttttgacgacgaagccatcggtattgaatggcccgttgctacggaacagcttctattatcagataaagacggacatgccgtatcgttcaaggatgcggtctattatgaataaaatatgaaaatagccattgtcggtacaggatacgtcggtttggtaaccggaacctgctttgcggaaatcggtgtcaacgttatttgcgtagacacgaacagtgaaaagatagagtcactgaaaaagggtgttattcctatctatgaaaatggactggaagaaatggttagccggaatgtgaaagcaggacgcctgcaattcaccacgtctctggagagttgtctgaatgaggtggaagtggtattcagtgctgtaggtacaccacctgatgaggatggaagtgccgacttgagctatgtgctggaagttgcccgcaccattggacgcaatatgcagaaatatgtgttggtggtaaccaaaagtaccgttcccgtaggtactgccagaaaagtgcgggctaccattcaagaagaacttgataagagagggatgaacattgacttcgatgtcgcttcgaatcccgagtttctgaaagaaggtaatgctatcaacgattttatgagtcccgaccgtgtagtggtgggagtagagtccgaacgagccaagaagataatgagcaagctctacaaaccattcctgctgaacaacttccgtgtcatctttatggacatcccttctgcagaaatgacaaagtatgcagctaactccatgcttgccacccgcatcagcttcatgaacgacattgccaatttgtgcgaattggtgggagcggatgtaaacatggtgcgcagtggtatcggttcggatacccgtatcggacgcaagttcctctatccggggataggttacggcggttcatgcttccctaaggatgtaaaggcactgattaaaacggctgaactgagcggctacaagatgcgtgtactccatgcagtagaggaggtgaacgagaaacagaagagtatcttattcgaaaagttgcagaagcatttcaataatgatttggagggaaagaccattgccatttgggggctggcctttaaacccgaaacagatgacatgcgtgaagccccggctctggtattgattgacgagttgctgaaggccggttgtaaagtacgtgcctacgacccggctgccatgaacgaatgccgacgccgcataggagaaagtatttattatgcgacagatatgtatgatgctgcgctggatgcagatgcactgatgctggtgaccgaatggaaagaattccgcctgccttcatgggcagtcatcaagaaaactatggaacagccgttggtattggacggacgtaacatttacgacaagaaagatatggaagaacaaggtttcacatatcattgcatcggaaaataaagttgcagaaaaaagaaaagaaataaatagggacgttatgacaataaaaagaagtgcgattctcattgtacttgttgtctcattggcatcatgcagcaacagacaaaacggggaggtttccgtcaaggaagaccttactgcaaaacaactgttgcaaggcatctgggtgaacgatgaaacagaaatgccgttgatgcgcatcgaaggggatacggtatattatgccaacccgcaaagcgctcccgtacctttcaaggttgttcacgatacaatctacatatacagcaatgaaccggtggcctataagatagaccgtcaaacggaatacagcttctggttccactcgctggccgacgaagtaattaaactgcataaatcagagaatgcggaagattctttggttttcaccagtcgagaagtggaggtcatttctactactccggaagtgataaagaaagacagtatcgtaacatacaagaatacaagatataggggatatgtatatatcaacccttcaaagatgaaggttttcaagacttcctattctgaaaatggaatcagtgtggacaatgtgtattatgataatgtaatccacatctgtgtatacgaagggaagaagatgctttatggccaggacatcactaaaaagatgtttgcggatatattccctgccgaaatgctggaccaggccattcttgccgatatgaatttcatgggtgtggatagtaaggggtaccattatcaggcaaccctcggcatacccgaaagttccgtatacaatttggtaaatatgattattggttttgacaatacaatgaacatagaaaaagcggaataaatccgctttttcttcaccacagtgtttatttcttctcaccgccattctgtggacgtttggccctgggctttccgcctttattgttgttacggccgttcttgtttcctcctggcttacgtccgtttccatggccgccccgtcttcctcctccgtcaaatgctctcggcttgtattcgggtgcttcacccagctcttcgggaaccggtatcttatagatgtccctatccaggaatttttcgatattcttaaagttcccctgctccttttcggaaacgaaggtgatggctacgccgtcattattggcacgcgccgtacgtccgatgcggtgcacataatcttcactgtcgtggggaacgtcatagtttatcaccagacggatgtcatcgatatcaatacctctcgcaacgatatctgtagctaccaggatattgatacgtcctgccttgaattcgtacatcacttcttcgcgctgtgcctgctctaaatcggagtgcatttcaccaacgttcagtttcatctgcttcaaagctttggtcacttccttcactttcagtttggaagaagcaaagatgataacgcgttccggcgtctcctctgcaaagaggctacggatgatgcccagcttctgattctcgtagcagacgtaggctgcctgcacaatcttttctgccggtttggaaacagccagcttcacctcggcaggattgttcagaatgttaccagccaactgttgtatcttagcaggcatggtggcagagaacatgattgtctgccgctctttaggaaggaatttgacaatttgcataatatcgtcataaaatcccatatccagcatccggtctgcttcatccaaaataaaataagagacacgggaaagatctacataaccaaggctaagatgggctatcaaacgccccggggtagcaataacgacatcagcacccagtgtcaaccctcttttctgctgctcgaatagtattccgtcattaccgccatacacggccacgctggaaaccgacatgaaataagagaaaccttccatctgttggtctatctgttgcgccaactcgcgggtaggagccatgacaatgcaattgatggcatcggcagggtgtccgccctctgaaagcttgttcaatataggcaacaaatatgcggctgtttttcccgttccggtttgtgccactgctattaaatctcgaccttcgagtatgacgggaattgatttttcttgtatgggggtgcactcttcaaagcgcatggcatccagtgcctccagtacattgccatttaaatgtagttctgaaaacttcatgtatctcttttaaatttgcgtacaaagataggaaaaagacttataaaatagactcttacagtaaaaaaataagcccttgggacaataattatctcaagggcttgcaaatttgtttcaagcatctgccttcaacggggaatatcaatgtatgaatccttaaatcccagaaagtaaagtacgccatctaagccgatggtattgatggattgcttggcattggcaactactttgggctttgcatggaaagcgattccaaggccggcaattcccagcatgggcaggtcgttggcaccgtcgccgacagcaatagtctgcgcaatatccactttctccacctgagctatcaaacgcagcaactctgccttacgcttaccgtcgactacatcaccgagatagcggccggtcagtttgccatcctctatttccaactcgttggcatacacatagtctataccgtacttcttctggaggtactgcccgaagtaggtaaaccctcccgaaagaatagctatcttgtaaccgtatttcttcaaaacatacatcaggcgatccacaccttccgtaatgggaagattttctgcaatctcctgcatcacggactcatccaatcctttcaataaagccactcgttcgcgaaagctctcaatgaaatctatctcaccacgcatggcgcgttcggtaatggcctttacctggtcgcccacacccgcacgtatggccaattcatcaatcacttctgtttcaatcagcgtagagtccatatcgaagcaaatgaggcggcgcatccggcggtacatattgtccaactggaaagagaaatccatttccagttcggttgccagtttcatcaactgttcttgcatggcaatacggtctttcggagtgccacgaacggaaaattcgatgcaggcgcgtgtacgcgattcgcattcgtccagcgggatacgtcctgtaaggcgcttgatggcatcgatattcatgccttgctctgcaagaatacgggtaacggcagatatttgacgggcagacaacttacgccccaataaagtaagaatatagcggttctttccctgcatattcacccaatcctcgtactctttggtagtaatggggtagaaacggacagtcacgcccagggaggaagccttgaaaagcagttccttcataatgaaccccgagtgttgttcttccgtcttgcacaaaatgcccaacgaaagagtattgtgaatatctgcctggccaatatccagaatggtagcatcatatttcgccagaatttccgtcacggaagctgtcagtcccggacggtcttcacccgtaatacgtattaggatgagttcagtgttcaatggttgcat

SEQ ID NO: 546 - DNA, 13042 bp, unidentified
  source 1..13042: mol_type = unassigned DNA
ttattcatcccttttcattgaagtttgtcccgttttgattgtcacacctgaaccctcggttgaaatgacaaccgttccgttttcatcggttctgtatgtttcaactccgaattcatcaagcagctttaatgtgcttttgtgcggatgtccgtagctgttatccttgccgagtgaaataaccgcatatttaggatttaccttttcaagcaacgcttttgttgttgatgttctgcttccgtgatgacctactttaagaacttctgcactcatatctgccgtaacggtttcaagctctttcttttcggcatctccgaggaacagaaaactgtcgtttttataagttatttttagaattacagagcaattgttcagatcatcctcgtcaattgttacgggagcaagaatatttatgctgaaatcgttgtcatcaataatattcatacccgctttggctgacttgactttaagtcccttgtctgcaattgccgtgagcagattctcataggtcttggttgtggttgtaaccttaggcatatagatttcgccgatattattatgctttacaacataagccattgaaccgatatggtcggcatgagggtgagttgcaacgagataatcaatatttgtgtatccgagattattgatatattcggtaatacttttaccgtacatattttcgcctgcatcaatcagcatacacttttgattcggcagttcaataaatatgctgtcaccctgtccgacatcaaggcaatgaaccgataatgttccgatttctgaaacagttgttttgctttccgaatcggaaccgttcacattgatattgattgaacacgaacaaagtgcaagacaaattaccgcaaacaatgcagtaagctttaatattaattttgaattaattttaatttttgacacctcacaattctgagtcttattgtacaataaacaagtcaatatttcaagaacagaaaaaggagagcctttgcgactctcccctttcgattatcattatgcggttttgcctgtataaagctgatagtatctgcccttttgttcaagaagccgttcgtgtgaaccacgctcgatgattctgcccttttcaagaaccataatacagtctgaattcttgattgttgaaagtctgtgggcaataacaaaggttgttctgccgtgcataagcttatccatgctgtcctgaaccatcttttcggtacgggtatcaattgaacttgtagcctcatcaaggataagtgctggcggatctgcaacagcggctcttgcaatcgcaagcatctggcgctgtccctgactgagattgccgccgtcacctttgagcagggtgttgtagccgtcaggaagttttctgataaagctgtctgcattggcaagctttgccgctgcgatgacctcttcgtctgttgcgtcaagtctgccgtaacggatattttccattacggtatccgtaaacaggtgcgtatcctgtaaaactataccgagtgaacggcgaaggtcgccttttttgattttgttgatattgattccgtcataacggattttaccgtcctgaatatcatagaatcggttaataaggtttgtgattgttgttttgcctgcacctgttgaaccgacaaacgcaatcttctgaccgggttctgcgtacaaatcaatattgtgaagaacgattttatcatcagtataaccgaagtcaacatcgtccataacaagcgcacccttgagttcacgatactctgtttcgcctgttatgctgtgagtatgtttccaagcccacatacctgttttttcctcagtttcaacaagcctgtcgccctctttgcgtacattaacaagtgttacatatccgtcatcaacctcaggctcttcgtcaagaagtttaaagatacggtctgcacctgcaagcgccataacaattgagttaaactgctggctgacctgattgataggctgggtaaagctcttgttgaatgtgaggaagcttacgagtttaccgattgtaaatccgaggaagttgttgagagcaaagatacaacctacgattgcacaaagcacatagctgatgttaccgatttgtgcgttaatcggcataaggatatttgcaaacttgtttgcattgtatgaactgttgaaaagcctgtcattaagctcattgaattcttcaatgctctttttttcatggttaaatacttttacaaccttctgaccgttcatcatttcctcaatgtaaccgttagtcgcaccgaggtctgcctgctgttttgcaaaaaaccttccgcttcgtgacgcaagctgttttgttacaaaaagcattaagccaaccattacaagtgtaagaattgtaagaggaacactgagtgtaaacatactgacaagaacggctatgattgtaattccgctgttgaaaagctgaggaatactctggctgatcatctgacggagggtgtcaatatcgtttgtgtaaacgctcatgatatcgccgtgagggtgtgtgtcaaagtattttatcggaaggctttccatatgttcaaatatctgacaacgcaaatcacgcattgtaccctgtgttacataaaccataatttttgcgtagataaacgccgacgccgcaccgattgcatagaaaattgcaactcttaaaattgctccgagcatcggtccgaagtcacggctgccgctctgaatcatcggagtgatgtaatcgtcaataagattctgaataaacaatgaaccctgaacatttgcaagtacgctgatgaggatgcagacgaaaacaataatcatctgaaatttatattttttgaagataataccgaatagtcttttaagaacctgacctgaattttcaaccttttgtgcaggtcctcggtttcttcttcccattggtcccggcataattacagctctcctttcgcatcaaaatcaccgttgccgcttgtctgggcaacataaatttcattgtaaatcggactgtttttgataagttcttcgtgagtacccactgcgcttatctcaccgtcatccattacaataatcttgtctgcgtgtgaaacgcttgatacacgctgtgaaataatcagctttgtagtatcggggatattctcgctgaatgccttgcggatacttgcgtctgttgcggtatcaactgcacttgtcgaatcatcaagaataagaattttcggatttttcagcaaagctcttgcaatgcaaagacgctgtttctgaccgcccgaaacattagtaccgccctgttcgatttttgtgttgtacttatcggggaagctttcgataaacgcatctgcacacgcaagcttgcaggcattgacgcattcttcctctgtagcattttcgttgccccatctgaggttgtcaaggattgtaccgctgaaaagaacattcgactggagcacaaccgaaaccttgtcacgcagagtttcgatatcatagtcacgaacatcttttccaccgaccttaacagaaccttcggttacatcataaagtcttgcaataaggtttacaaggcttgtttttgaagaacccgtaccgccgataataccgattgtttcgcctgatttgatttttaggttgatatcgttgagaatcggtttttcggcttttgtgttgtatgagaatgaaacattgtcaaactcaatgcttccgtccttaacctcgtaaacagggttttcgggatttgcaagcgttgatttttcattaagcacacctgcaacacgcttaccgcttgcaatgctcattgtgagcattacaaacaccattgccaccataagaagattcataagaatgttcatacaatatgtgagcatacttgtaagttcacctgttgtaagctcactgcttacgatcatatttgcgccaaaccagcttacaaggatgattgatgcgtatgaagtaaccatcataatcggtgatactgttaccatggcattttcagccttaacaaaaagtctgtaaacattgtcggctgccttgcggaacttgccaacttcgtgtttttcacgaacgaaagcctttacaactctgattgaagttacattttcctgaacgcttgcgttgagttcatcgtacttttcaaaaacctgactgaaatacttgtatgttgccttcataataaaggcaagaacaacagaaagtaaaattgttgcaatgagataaatacaggcaagccttgcattgatgatgaatgtcattgccattgcacagatgagcgatacaggcgctctgaaacacattcttaaaagcatctgatatgcattctgaagatttgttacatccgttgtcatacgtgtaacaagtcctgcggttgagtaacggtcaatgttggcaaacgagaatgactggatatttgcaaacattgagcgtctgaggtttcttgcaaagcctgccgaagcttttgcaccgtagataccgcccatcatacctgcaaacaagcccgtgagtgcaagtgcacccatataaccgcccgttatgaatatgtgctgcatatcgcccttgttgataccgtcgtcaatcattgatgacataagaaacggaataattgtttcaacaattacttcgagtatcataaagaacggagtcagaacggattctttgacgaaacctttgatattttttgccaaagtttttatcatacttatctccttccgttttaatttgcattttcaagtccgctgagaattttatttataagaaaaagaaattgtttcttttcttcttttgtcagcagactgtcaagcaaagtttcgtttttggttatcatattttcgattttgtaatgaagttcaatacctgtttcggtcaagacaagttttttgagccttgcatcactttcaacgctctccctcgttatgtaatttttcttttccataagtttaagaatacttgtaacggttgaacgggcaattgaaaatgcgttttcaatatctttttgataaacatcttcatcacgatgatcatagagatatgcaataatccagccgtgcataagagtcagcttatccacacccttatccttggcggaatagattaactttctctgcaaaacctgattaagcaccttgatttcgtgaccgattgaatcattaaagcgtttgttgcacttacagctttttacgcttttgtcatcacacattatttcacctccgaaatcacacttatgagatattgttctatatagaatagttcgatacaaaacaatttgtatcagtaattatagcaccttcattttgaatgtcaagagaaattacaaataattattcaaagtttcacattgctgtcacaaatcaaaagcgacagctaaaattacagctgtcgcagttaaaatcatattcactttgcacaaattatgacaattgtcacttttttaggatttctgtcgcatcacggatatcgggggttttatcaccgttaatatcacaaacaaaaagagcatactgattttcgtcataatcgtcaaaggtcaggtctttgataagatacttctgaataagctcagcgtccttttcatctgtttttccgtcaatgttgaggtctttcatatttttgggaacgcaaccgccgtcaagtacaaaatcaataccgctgtcgttcatgagttcatcggctctgtttttgtcaacatcaacaatgtaaagtcccaatgtgtcaaagcattgataaacatactttgcatcctttaaaatctcggctttcttttcttttgccctgtcatttgttatgcctgcaccttgaagatgtgaatcaagctttgcaatcatctccattgcgtaatcgttatccgtcattgcacgctcgagatcaacaccgtttgtcatatagaaccaaccgagcgaacccataacatatagattattcacatcaagtccgcagtaaacggcaattttcccgtccttgtactgaccttttttcatcgacattttggaatagcccttgattatactgtagccgagcttcattccgtcctcgctgatatagtcaaggtcaaacgccgctgcacttgtgcatgaaaagcacgctccgccgatgagcattgcaaatacgagcaatattgaaatcacctttttagaaaattttcttttcataaaaaacacctccattggtagtatcaccgaacggaagtgttttattttgatttatttacttttatttgacttattattttttctttcttttcttatctgattaagctctgaacctttggtttttacctttcttttaaattttgcaacggtaaacgcttttatcctgtcatgatagacataattgatttccgcacaaaccataagacaaaccataagaaagtaaaaccaaatcataataacggcaattcttgtaagacctccgtacacggagaatccgttgaaatccgacacataaaccgaaataccgaacgaaagaacataccacgaaaccgtgcagagaaacgcaccgggcaactgtgacttaaagccgtattccttatgctcactgcgtgagatgttcggaaagttcctgtaaatcagcgcaaacaataccgtcagaaacaaaaagataagtatatatctgagatgatagattattccgattatgtcaggcaacgattttagatgcggtgaaagaaaatcgttaattgttgaaccgaggacaataagtacaagtgacgcaagcaaaattacaaacaatgcaattgtgtagaacatcgcccttattcttaaaaagaaccagtttctgttttcgtaagcatcataaattctgttaagaccgtttgtgattgcgtggattccctgtgccgccgaccacagagtgactacaagcgttacaagagaaattcccacagcactttcataggcagaggtcagaaagtatgttaaatcatcggcaatttttgacgaaaacacactgctgagtccgtgataaacaaaatcaatcggaatgtgcaggttctgcaaaagtgacacaaagaacattgagagcggcacagccgataatataataaagaatgccgactgtccggcaattgcaaaaatattatcgtgaacgcatttgcttgttatcggttcaaatctgcctgttattcttttgtaaagttttatcgccttgtcaacgaattttatcctcaatgtgtcacctcccctatttctatatgatatatatgataattattttataccgtttttcttcatctgcacattataagaaattctcgtgagaagtttttcgggtgcaaaatgtctgaaaaacgacaccgctttcatttcaaagccgggtgtgataatcattttgcccttcatggtcatgtcaacggcataccttgcgacaaacttcgggtcaagtcctcttatgcagaattttacatccgcaacattattgaagttggtttttacgggacccgggcaaagtacggaaaccttgacatttttattatccctacgcatttcctcatgaattgcctgagtaagacggacaacataattctttgatgcatagtagcttgcaaatgtcggtcctgcaagaaatcctgcggctgaacctacattgagaatatatccgctgtttctctccgccatatctttaagaaaaagctttgtgagaatgtgaaccgttgaaacatttgtgtgaatgagttcaagctctctttcaagcggaacatccaaaaattttccgtatgcaccgaatccggcattgttgacaagaaaatcaatctgttcattttcattcttaatatgctcatacaaatccaggctgtcactttctcgtgaaaaatcaagcgtaattaccctgacattcacatttgaaagttcctctttcagcttgttaagcttatcggttgagcgtgatacaagaataaggtcataaccgagttctgcaagatatcgggcgatttctttacctatgcccgaacttgcgcctgtaatcaaagccttcattagttttcatcatccttcggtttttgtgctgtggcacaaagccatgttgtaccttccttagtgtatgtgtttatgttttcaaagcctgccgattcaagtacggctctgatttcctgcggagttaccgacttgatattcagcatattttcaaccttttcccacttgaacggatcatcgtctgttctgagcatttcaaaaagcagcataaccgttccgccctgtttgagaacacggaaaacttcttttacatcattctccttatcaggccagaagtagtaggtttcaactgccgtgatattatcgaatgtattgtcatcaaaaggcatatcggatactgatgcctgaagaattttcgctttgttgcagagtatattttttgagttgagtttttcggaggattttaccgagagttcggaatagtcgattccgtaaaccttgccgttggcaacaattgagcaaagtcggtcaacggtttttccaccgccgcagcctatgtcaagtacagttgcggtgcgttcgatattcatatgttcaagtccccatgaggtgaggcttgaatgtcctttattcatagctttaatcatcattttgccccaaaagccgcttggctttttagcattctccaccaacttgcggtatttcataaaaatcactccaatctgaaattttcatctgtttactgtcttattatctattattttctttttcttcctgttgaattaagtttttgaagcagaagtgcaaggaaaaatgcaccgcctactataacgatgaaccaaacaaatgacatatacaacggttgattcatcacacgcaaaaacgggtatggaccgtcaaatgcaccaactatgttaagtataataagaacaatcgcatatattaatgtagggattgtagccgtgaaagctgattttgtgttaaggtgaggttctttttcaaaaagcacaaacgataaaattgtaagaatcggacacaaagtatgtaaaaaggtgaagtctttgttaaaaagcatatagagccaaccgtttacgccctctcctcgcatcggggaaagtacggcaagaactacaataaatgttaccgaaagcacagccgccgccatatatttaaacatctgaaccgagtgcggaatttcttttccgcttttgagatatcgcacctgaaagcctgccataaccgcacaggcaacaagtgcaaacaggttgctgtcctcagtgtaatatacaagcggatagcagcctattttgaaaaacacgataattattgcggcaatctcacaagcgataatcgcaagattaaatgccaaagctgtttttgttcgttttattttaagtgtattttgcatttttaatccttttctatattattttgttaatttctttcaatcaatgccacgctttccacatggctcatctgaatacgatgaatttcttggctgattttgggttcaagggaatacatccacagcctttttcgtggttctgccgtttgtggggatatgtccgtgaaactgaagttttcgcattatctatttcaatgtaaataatgctttttcataatccttaacataatacttgatattagtttttcctttttgcactacagtatgtccctcagtttcaagcattttcttttgtgcctcaattcctccgggatactttgcatttaattctccattcgcttttaatgttctccaataaggggttttatcctctgtgcgctgataactcgcccatgcaactattgaaacaaaaattccggctgtgataggctctgtaaaatcggcactgcttaactctgcaaagtattctcgtatttttccgagagtaatcactttaccatacggaatttttttcattactttgtcatagtcgattggcggtgcaaaatacattttatctccaccatattttttaatactcttttcatctgtgattatttgaaatttaggcatatccttgctatccataagcatagcattaaaatcctttttatcttcatttgccataatgtatcacctccaagccaatcatatctcaataaacagactcatgcaatgagacgcttttataatttctcgcaaaacattaaaatttccatttactcttctttcatcttttcttccagttcaagtaaatatctgtcatagtcagacataaacaatctgtcctgaatgatgcgatatttctcaaattccgtttctgcgtgaagttttgcctgctctgcacttatctttcctgctcctgtgagaatttcagtaccgttaaattcgaggaaaccgtcaagtcttttcgcccaatcctccatgctcataggaatatgacgttcggcttgtaactctgcataatcgagatacagcgatacaatacgttccaaaaaagacaattctttttcagtaagatagttttttgctacagatacatcgcttttcactattttaccatcaggagcattttcccaagaggttagtcccatatgttccttttccgcatccgctcgttcaacaatcagttccgcagcagtatgtctgtgcgtagcatagtgcattttgttctgcacagttttgaaaaagagtcttgtggtttttgcatctttatcatagtcgaaagctgttgcataaaggtctgtaaccttttggtagaattttcgctcagacaggcgaatttcacgaatgtattctaactgacggtcaaaatattcatctgtgaacatcgtgcccttcttcagacggtctacatccattgtccagccctgaatggtataatcttttacaatttgacctgcccatttacggaatcgaactgctcgttcattattaactttaaatccaactgcaataattgcctgaagattataatgttttgtttgataattcttcccgtcgtcggcagttgttaagtatttcttaataactgaattctcgactaattcgccgtcttcaaagattttttttagatgttgattgatcgcaggcacagaaacatcatacagcgttgccatcattttctgtgtgagccatatattttcgtcctcataacgcatttcaaagctatctgcctgatttcccacagaagcaacatatgtgagatattccgcagcacttgagcgaatacttatttcatttttcttctttgccattttgtgcacctccatcaaaaagcatcaccatcggtttcactttttctttttaaataagtcaattcaatatcgtaccccaaaccccaatcatatttcattttaatttgttgcactactcaataatcataataaatatgttacttttgactttcattaattacagaaccttcatcatataccttggttcatattctatatatccgtgtttcggataaaaaacataagattcaaaccactgctcctttggtgtccccaaatgtacttttgaaacagcaatgccgttttcacgcatccataactctgccgtattaagtaactttgaaccgattccctttcgttttaatgacggttttatataaagcctatgcaaaaatgcctgatctgtatcagtaattcttgaacatccaatacatccgactaccctgtcattttcatctattgcaagccaaaacatatcattgcaatcaagatagtttgccttaatatcaagaaggtcaggatttatagtaggttttctacccaaagcatcttttgcctgtaaaaccgtaaaaatcatatcatcacgatagatttcttcaaatttaataattttcacacctttactcctgtactttagtcaacagagccacgctctctacatgggaggttccggagaacatatcgcagggggtgatttctttgggggtgtagccgttttctgtgaagaattttaaatctcttgcgagggttgcggggtcacatgatacatagactacacggctcggtgacattcttgaaattgtctttacaagctcttcaccgcagccttttctcggtgggtcaagaattacgcagtcgggttttaagccttctttttcaagctgaaatgcggcatctgaggcatctccgcagatgaatcgtgcattttcaatgccgtttgcttttgcattttcatttgcatccttcacggcatcttcaacaatctccgcaccgataagctgtttacaggaatcagccattgtaagacctattgtacccgttccgcagtataaatcaagcagaatttcgtcagatttaagatttgcatattctttggctttgccgtaaagcttttcagcctgttttctgttgatctgccagaacgaaaacggtgaaattttaaactgcaatccgcaaagtgtgtcggtaatatggtcacttccgtagattgttctgttttttctgccgagaacaacattggttttttctctgttagaattaataatcacactttttaactgcggaagttcggatttgagcattttcacgagtaaatcttcctgtttaagaccgtttgcgttgacaacatagcacaccataagctcgcccgaaacctcgccaattctgatataaatgtggcgaagtcttcccttgcctgttgtttcatcataaatttccgtgttagtttttgcgataaaatcttttgtgatttcaattacccttgcaaaaatttcgggctgtaaaatacagtcggtgcaattgattatgcggtggctgtggaatgaataaaaaccagtcacaacatttccgtcacggtcaagaccgacaggatactgcgccttgttgcggtatcttgtgatattatccgacgaaattatcggcttgaaaacaacattatcaagaccgccgatgcgtgttacggcatcctcaactctttgctgttttattttgcattcttcttcataagaaatatgtcgccatgtgcaaccaccgcacttcataaagttttcgcagtcgggagtaattctcgccttggacggaacaagaatttcttcgattttgccgaaagcgtaggttttcttaacctttaatatacgcaccttgagttcgtcaccgattgcagaaccctgtacaaaaacggcaatgccgtcatctgttcttccgactccgctgccctcggcagttgccgaagttattgtaaggtttacaatatcgttcttttttaaagtcat

SEQ ID NO: 547 - DNA, 8073 bp, unidentified
  source 1..8073: mol_type = unassigned DNA
tcagccatttgcatatgcctcctttattacttcttcaaatttttctttgccgacacggtcaatcgtgaacttaaaacgttctcctgcctgtgcattctgttcaaagaatgtaattgccgcatcacagacttttaacagcttatcatggtcttcaataaacggaatcaccgtgttacccttgttgatgtgattaccgaataatccgccaaaggatacgatataaccatgtgtttcatcgtatgcgttggttggacaggccttggtacatcttccgcagtagttacatttgctctcatcaatggaaatctttccatctgttaatgtaattgcaccgctgcggcatgcctttacacagacaccgcactggatacagtcggattctttccactgtacctgaataccacctttaataccaacatcgttttcttcggatttcagacagttgttctgacagcctgtaataccgaatttaaacttatgcggcagttcctttgcaaagtaacggtcgtccagttcttttgcaagagcatatgtatcaatacagccgcttggacagattgccgcaccctgacaggctgtaatggtacggactctcggtccgcatacgcccggttcaacgtcaccttctgccaatgctgcttttacttcgtcaatatcgtctaatttgataaacggaatctctacgctctgtctggatgtcagatgtacgtatccgtcaccgaatttatccgaaacttcagcaatctttgccagctgttttgccgtaagatttcctccgactacacgaagtcttaaagagaagttgtttttttgtttctggcgcatgaatccgcccttttttaacactgcataatctgttgccatttgtacttcctcctgatataaagctttcttagtctaaatccttaattgccgaagtgaaatcttctattaaatcgctgccgtcttcaataccgacactgacacggattgtatctgcatagacaccggcatcccgcatctgttcttctgtattgtggatataaattgtagaagccggatgaattaccagcgttcgtgcatcaccgatattcgttgcattgagtgcatactttaaatggttcatcaactgatacgctctttcttttgagccgacacgcagagttaagattccgccgcccataccgtttaactgactttctaccagcggcttatacggattgttttccaatgccggataattggctgttacgccgtttaatccgtcaactgcctttgcaagttctaaggtattagaacaaatcttatccatccgcagtcctaaggtgtccattccgataaaatttaaaaatgcgttcatcggtgctaaacagccacccatatttctccagattccgttacgcagctttgcaacgtaggcaaattcaccatacttctgatattcggcaaatcccggatatcttttattgtcccatgaaaacttaccactgtcaacaataacaccgctgattgcattgccaccgccattgatatattttgatgatgaatgaaccaccacatccgcgccgtatgcaatcggctgtaccagatacggtgtcgccgttgtgctgtccacaatcagtggaatgcccttgctgtgtacaaactcggaaacggcttttaagtcgataacatccagtcccggattgccgatgacttcgccgaagacaacctttgtcttatctgtaatgagtggtgcaatctcctcaaccgtaatctgctttgcaaaacgggttgtaatgccaaatgcctttaaatcaccgaataaatcaattgttccgccaaacagtccgctgcctgcgataatctcatcgcctgcttccagaatgtttaacagggcaagtgtcacggctgacataccggaggaacaggcaaccgctccttttccgccttccagttcacagacccttctttcaaaggaatcgacaaccggattactgattcttgtataagcatatcccggtgccctgttattaaaaactttttccaaatcctgtgctgtttcatatgcaaaagcactgacctgactaatcggtggaagtgtcgctccgtcaggataccgcttaattgcatttccatgcagcaattgtgtgttaaatttcatatccctcttattcctatctgcttactatgatttcaagttgaatttagtataatccatattctcccatgtgtcaactactttttcatggaaaaataacagtttcaaatgaggtgtgccgctgctgtataccgctgtatataaacgcagagccgggcagtctgcctctttcggcacagctttgcccggctctggacgtgtctatatgctgcccacgaattgttgtgcgcttacgcactcccacaattctgccctcctatgagcaagctccggcgggtgaaaggctttgtgcccctggcagcattagataaaatctccgtgtacggatacgcccgccgcataagaagatactttctttacaaattctgccgcttcggatacggtaagcgtaccatccgtctgccagtttctgtaataagtcttgtcatcctgtgcaaaggtctttcctgcaaatgcttcatctaatacaagcagtacaacgacaccggcttctgtcaggtggtgcagtacggtttctaccggttcatctgcttccggcgcatacagataagtatgtctgccttctgcgcttaactgcttttcaacctgttctgccagttcaagtgtaatgccgtgctgtcctaccggaaattccacggttactgcactctgaccgtttaaggctgaacgaagctttttattgactttcttttcttccagtccgtcttcatcggcatgcagttcagtaacaacaccgcaggcagaagtcatattggttacacggtcaattaaaatcagttcaccgagtgtcttatgtgccgcaaatgtatctgccacgattctgtctgcaaatgcgatttcgcagactgcgatttcatttttatgtaaggaagatacttcctttttctcgcctgtattgacatcaattaatgaaacaatctttgttacaagccccggaatcatcttcgtgccaagcttgataaagaagttttttccgttttcaagagcatcatcatccatccacagaatcgttgccgtaacggctgcggctgtcttgataccggaatctacggataatacacagcctctggatacgtccacttccctgtctaactgaatcgttaccggctggccttcctgtgcggcatctacattcttatcacctacatggatactctttacatgtgcctgctcgttgcttggaagtgttgtaatcgcatcacccacatgaatgtttccggcttcaatctgaccctggaagcctctgaattcatggtttggacggcatacgcgctgtaccggcatataaaagccctgttccttggctgcggctgtaatatcaacctgctctaagtacgaaaggagtgcctgaccgttgtaccatggcatattcggtgattttacggtaacattgtcaccttctgttgcggataccggaataatcgttacgttctgtaaatccagttcctttgtcagttctgcaatctgttcctgaatctttgcaaataccttttcatcatagcctacaaggtccattttgttgactgcaaatacaaagtaacggattcccattaatgcacagattcttgcgtgacgtcttgtctgaaccagcacgccctgttttgcatcgactaagataacggctaagtctgcaaaggaagcacctactgccatgtttcttgtatattcttcatgtcccggtgtatcggcaacgataaagcttctgttgtctgttgtaaaataacggtatgcaacatcgattgtaataccctgttctctttctgccatcagaccgtctaacagcagagaataatcgattttaccttcacggcttccgaccttggaatccagctccagtgccttttcctggtctgcataaaggagttttgaatcatataaaatgtgtccgattaaggtggattttccatcgtcaacactgccacatgtaataaattttaataatcccttcattttagaaataaccctccttctttcttctctccatgctgcctgcttcctcatggtcaatcacacggctggtacgctctgaagatactgcacttaatgtttcctcgataatttcatcgagtgtttccgcatcggattccacaccgcctgtcagcggatagcagccgagtgtacggaaacgtactttcttattttcaatcttttcgccttctcttaactttaagcggtcatcatctaccatgatgatgtttccgtcacggtaaattaccggacgttcctttgcaaagtataacggcacgatttcaatgttttcacgcttaatgtactgccagatgtctttttccgtccagttggaaatcgggaagacacggatactttcgcccttgtggatctttgtgttgtaaagcttccacatttccggacgctggtttttcggatcccatgcctgtgccgcatttctgaatgagaagatacgttcctttgcacgggacttttcttcatcacgacgtccgcccccaaatgctgccgtaaactgatacttatttaatgcctgctttaatgcctgtgtcttcatgatatctgtgtaggctgaaccgtggtcaaacggattaatgcctgcctttacaccttcttcattggtatatacaagcatttcaatacccattttttttgcgatatggtcacggaactgtatcatttccttaaacttccatgttgtatcaatatgtaagaacggaaatggcggcttctccggataaaatgccttcatcgcgagatgcagcataaccgaactgtcctttccaatcgaatacagcattaccggattttcacattccgctgccacttctctgataatataaattgcttctgcttccaattcatcaagatgcgataaatttcccatactctctctccttaatatttatttgcgtcttttttgttgacttctataacctgtacactgccgtccggcgatgtaacgcaccactcacgaatgtcccctttggacttgacagacagcgtacttcctgcaccgcccatatctgctcccagataaaagctgattgcgcctgtcttacattcttttaagcatgaggtacagccccagcagtcggaaatgtgcttaatgactgcctttccctgtgcatctttttttatcaggttgccgggacaggcttcgatacaccttccgcaacctacgcagttattttgtgtaattcgtatgctcatagtgttttcctcccgtcaccagttctctgaaaatgatttctattttgccgtctttcatgcgggaattgacatatttttcccaatcggcattcttttcaggataatccgcattttccgcaaaactgtgccagcgtgtttcttttctggcaagcagatgtgcgataacgacctgacagacaaccagacgttctttgacttcgtaaatacggagcagatcgtccatgtcttctgccgcaagtccgtccaccagcttttgcagggatgtgattttttcctttgcaagggctaaacggctttcattataacggtaatccgttgcaataccgcctgcgtactggtccatgattttctgcatggtttcctcaagctgttcggtcgtaagcagtccctgcggattgtttaaaaaatgctcgtattctgcctgcttttcattctgctttgcttcactgtccgcatctttggctgctgtctgcttttcatcttttagaaattcaagcaccgcttctgccgcaatttcgccctcggctaatgcgccggttacgtatttctgcggacagccgcctgcaacatcgcctgcggcaaacagtccgtgaattgttgtttccctgttattgtctacccagtaaccgcttgcggtatgtccgcccacaatatacggctctgtgccttcaatttccacattctgctctgacgggcccttgccggattcaagccactttaaagtctggctcggcgccatatttaagtatgccttgtataaatcctgttcctgctcttttgtaatctcatcagtctttaaataacatggtccgtatccggctctgttttccataaccgttccgtatacacgctgggaagttgtaagaccgtattttgtttcataaatttcgccgttggaattcatctgctttgcggatacaccctgtgcaatcgttcctgtcggtgcaatcgtatctttacagcgcagtgcgataaaacgcatttcaaaggttgtcatctcagcgcctgccgtaatgcccattgcgtagcccgcaccggtattaaacggcgggtaccacattttatgtcttgaaaagcccggattgtttggacggtaaagtcctgccgcgcctccggttgcgcagatgaccgctttggcatgaatcacataaaagatttcttcattaacatcaaagccgtaagccccgtaaatgcggttgtctttcacaatgtaatctgtaatattgacgtgatttaaaaccgttacattttcctgtgcggatgcctcttctgcaagaatcggcttaatattttccccgttaatcttgatatttctgtttcctcttgtaacgtatttgccgttttcatcttttaaaatgacaagtccggctttttccataacatccgttacatggtttaaccgctctgacattgaaagcagtaagtcttcacgcacaatgccgtctgcatcttttttggcatagtctacataatcctgaggcactctgccttccgtaatataagcattaattgcattgacacctgccgccagacagccgctccgcctaatattggctttttcagcaatcagaacgctgatatttttttcttttccgagcgtcatcgctgcaaaacagcccgctgtcccgccgccgataatcaacacatctgttgagagttctttctttttcatggcaccttccattccgccgcacaacacggcttttctatcttgatttttagataaatactgaatcatctaccagtgactggttttccaaaagcattgccttttctccgaccgttacaaacagccgatatatgaatacatcaaccttttctcccaccgcaatacttttttcttccaatcctcttttggcaataatctgattgtcgtttacattgacaagcagttctaagctgtcacctctgaaagacacgcgctccacaacgccttcggaagccgaaggaccgaaacgctgtacttcatttttcttggatactttgacaaattccggacggataatggctttatcgacattgtccactttcggaaagctgtgaaagctctgataattggtaatctgtgacgtctgtccgaagaaagtcgccgcaaatgccgtctgcgggttctggtaaatttcaagcggtgttcccttctgctcaatgtgtcccttgttggtaataataatttcatcggcaacttcaatcgcttcgtcctggtcatgcgtaacgaaaatactggtaatgccgagtttttcaatcatttcctttaaccagcttctgagttcctgacggaccttggcatcaatcgccgcaaacggttcgtctaacaacagcagatgcgggtttggcgcaagcgcccttgcaaatgccacacgctgtcgttgtccgccggataactggctcggataccgcttttccagtccatctaggctgatgagttttaaaagttcgtggactctttcatctatatattttttattctcttttttaacatttaaaccgaatgcaatattgtcatataccgtcatgtagcggaacagcgcgtagttctgaaatacgaagccgataccgcgctcacttgccggaatgttgttgactaccttgccgtcaatgacgatttcgccgctgtccggtgtttccagccccgcaatcattcttaaaatggtcgtcttaccactgccgctcggtcctaacagcgcaatcagcctgccctgttcaatgccgaagctgacatgattggaagcctgatagccggcatacgttttattaatatcttttaattcaacatacat

SEQ ID NO: 548 - DNA, 14661 bp, unidentified
  source 1..14661: mol_type = unassigned DNA
ttattcattttctatcattcccgccggaggtgtcgtgatcgtctgtacttctgttgtcgaacctgtttcagatccatttgttgccgattcactcgaagcttcactgctttcctgtgttgtaacagcagtttcgcctgataccttatctatatcaattgcttctgttgctgccactcccgtttccgatgatacttctgtgcttatagatgatgctgaagtcgacggagtataacccgatgttccatacagatattcatgtaatgctgtaacatttgcattcagatccgctgctacgatcacactgcctttaccatctaaggacatcggtgtataagcgaacgggaatccaatatttcctgtaatcttatagtcagcaatatctttcgccaacgaagtcacttcatcctttgtaagactggttgatatgcagctaaaggatacatcgatcagattcgatatcatcttactgtctgcatttatcattttatttaccagaccaagtaatacggtacgctgtctcatggttctggtaatatctcctttacccgtgcttcggattctggaatatgcaactgcctgctgtccgtttaataccttcgttcccgcctcatgaacgccctcggaatattttcccgaaataccgatctgttccgcaagattcttgttcagattatttacctcatcttctgttattgttacctctacgcctcccagcgcattgattatatctgccatagcattaaaatcaacggtaatataatccgatatagcaagatccagatttgcatttaacgtattgatcgacattaaagcacccccgagctgatatgcgtaattgaccttatgagttgtctgagagtcgctctgtatctgtaacaatgtatctctgtataccgaaaccatcttaacttcttttgtatctttattgatactgagtaaaataatcgcatcactgtttgttcctgtatccagatttgaatctctggaatcaactccgtaaagtgcaatcgtggtataaccctttgtctgttcttttacaccttcgttgacaaccagatcactgttcttgatcggacgaatatccatctgattatacttataagatttattcgccgatacataaccgatcgtaaggatcaggaatactacgaacaatacaatgcctgtaaccgcccatttaccgagtgtattcagtcgaaatgatcgtttctgtccatcattacccacttctgatctaacaggcttccggcttctgaccttcttctcagcctcacctactgcatcccggacattttctctcagatttgcaaatacatcagcaaatgtatgtccatcttcttccgattcatccatatctgcctcagattccatggtatcatcctgcgtctgttcttcataaccgagtttcttataagcaagccttttccgttcttcggctacacggtcttcttttattctctctgtcggctgcttcgattcggacttctccgctgtcgcaaccccaacctcttttaataccgactctaatttgtctgcatattccttataggattccgataccggtgtttctttcgccgaagaagcatctgatacagaatctgccattttctcctcagatgtaccatctgctttaccgtcagctttgctattttccggttcattctgattgatgatcgaatcgatcagctcatcatcgtccgctgtcatttccttattccgttgtaacagtctgtctctgtattccgatagacgtttatcatactgtgtagtcttattatccattagtgaaagacatcctctctgcaactaaaaactttattagaacttaaatgtttcctttaatcccagccatttctggtccttatcactcaggttgagcgcggttccatcttccagatgatacccttccgcacttgcgtttccctgatattcaccaaagaccttcggccactcaataccaatttcaggatcattccatgccagaccgccctcatcaccgggatgatagaaatctgttaccttataacaaaattccgccgtatccgataaaactaaaaatccatgagcgaagccttccgagatatagaactgcttcttgttctcttctgtcaactccacaccataccattttccatatgtttcgcttcctgatctcagatcaacagcaacatcataaactgcacctttaatcacacgtactagttttccctgcggaaattccttctgaaaatggagtccgcgaagcacgccttttgtcgacatactttgattatcctgaacaaataccatattcagaccattttcctccatatccttctggttataggtttccataaaatatcctctgctgtctccatgtactgcaggttcaataatgtacaatccttctatcggtgcttttgtaactttaatctgtcccatcttatttctctacctcttttccacaaattaacgattaccatacatcttctcatagtaattctggtattctcccgagataatggtctcccaccattctctgttatcaagataccaccggatcgtcttctttattccatcttcaaactttgtctccggaagccatccaagttcattatggatctttgtcggatcgattgcatagcgcatatcatgtcctttacgatcgccaacatgtgtgatcagagactcaggcttgccaagttctttacagatgatcttaacgatctcaatattctgtttctcattgtgaccaccgacattgtatacttcgccaacacgccctttatgaatgatcaggtcgatagccttacaatgatcttctacatataaccagtcacgcacattcaagccctcaccatatacgggaagaggcttgtcattcaatgcatttacgatcattaatggtatcagtttctccgggaaatgatacggtccatagttattcgaacatctggatatgctgacaggcaatccgtaagttctgtggtatgccaataccagaagatccgctgctgcctttgagctgctgtaaggagagcttgtatgaatcggtgtttcttctgtaaagaacaaatcaggtctgtcaagcggcagatctccatacacttcatcggtggatacctgatgatatctctcaattccatattttctgcaggcatccataagcactgccgtacccataatatttgtctttaagaaaatatccggattctcgatacttctgtcaacatgactctctgctgcaaagttcacgatgatatccggcttttcttcctcaaataaccggtaaacggcatctcggtcgcaaatatccgctttaacgaatctgaaattcggattcttcattaccggctcaagtgttgacagattacctgcatatgtcagcttgtccaagcatacgatacgatattccggatatttatcaagcatatggaatacaaaatttgaaccgataaagccggctccacctgttactatgattgttttactcatttttatctttctcctcaatctatcttttatctttttatctgcaaaagctatgcaagcacatccagatacttaccatctaatacatccttcagatactgtccatactgattcttcttcaaaacttcatatacttcaagaacttcttctctggaaatccatccattcaggtatgcaatctcctcaagacatgcaatctttctatgctgatgctgctctatcgtctttacaaagttcgtggcatcaaccagactctcatgtgtccctgtatccagccatgtgaatccctgtccgagaagctctacatttaactgctgatgttcaagataaatacggttcagatcggtgatctcaagctcgcctctggcggatggtttcagattctttgcatattcaacaactttattatcgtaaaaatagagacctgttacacagtaattgctctttggcttttccggtttttcctcaatcgagatcgcacgtccgtctttgtcgaattcaacaattccaaaccgctccggatcatctacgtaataaccaaatacagttgcacccttaccgttttccgcattctgaacagctgcacgtaatctctttttaagtccgtggcctgcaaaaatattatcaccgagaaccattgccacagtatcatcaccaataaaatccgcaccaataacaaaagcctgtgcaagtccatccggtgtaggctgtacagcataagtaagatttacaccaaactgacttccatctcccaacagatcctcaaatcttggagtatcctgcggtgttgaaatgatcaatatatcacggatccctgcattcatcagaactgacatcggataatagatcatcggtttatcataaatcggaagcagctgcttcgatgttacttttgtcaacggatataaccttgttccagatcctccggctaaaataatgcctttcatctcttattcctcctgttaatcaaaaaacttttcattctttcacccgaattattatatctggctgtgatttctaacttcaggatttcccattcacagtctataataaccagtatccacagtctattatattatatagcatttctacaagatactcaaacattattcctattttttcttatttctactatttttttctgatttgttacaactttctattcattatatacaaaccgatgtttcctgtaattcaatgcatatatgaatattattcatatttgtatatgtaatattcatattttattctttttgtttcatgatcgtattttttcttctatccctcttctatattgtaaattctgttttcttccattttgtttcttttttattttttccacttttctattcaaaaaacacttgcataatattcactaccgttatatattaatttgcagacaggacgatatgtcctttattcaacaaatggaattatgatatatcagaaatgtacatattccacacagacggattttaaggaggatttagaaatggcaaaagacaaagttgttcttgcatactcaggcggccttgatacaacagctatcatcccttggttaaaagaaacttatgattacgatgttatctgcgcctgtatcgacgtaggacaggaaagtgagctggaaggactggatgaaagagcaaaatattcaggagcttccaagttatacattctggatgttgttgatgaattatgtgatgaatacatcatgccaaccgttcaggcagatgctgtatatgagaataaatatttactcggtacttctttcgcaagacctctgatcgctaagaaattagttgaggttgctcgtaaggaaggtgctgttgcgatctgtcacggtgcaacaggaaaaggaaatgaccagttaagatttgagctttcaattaaggctcttgctcctgacatcaaggttatcgctgtatggagacagccggaatggaagctggattcccgtgatgcggagattgcatactgtcaggcacacggtatcaatcttccgtttgatgctgctcattcttacagccgtgaccgtaatatctggcacatcagccatgaaggtctggaactggagaatcctgcaaacgaaccaaactacgatgatcttctggttctcggtgttacccctgaaaaggcaccggatgaggatgaatatctgacacttgattttgaaaagggtatcccaactgctattaacggtacaaagatgaaagtttctgatatcattcgtgaattaaaccgtttaggcggcaagcatggtatcggtattatcgatatcgttgagaaccgtgttgtcggcatgaagtcccgtggtgtttatgagactcccggcggaacaattctgatggaagctcacaagcagttagaggagttgactctggatcgtgaaacacttgcatacaagaagctcgtagcaaccaagtttgcagatcttgtatacgaaggaaagtggttctgccctctccgtgaggctcttcaggcatttgttgaaaagacacaggagacagttaccggtcaggttaagatgagactgtacaaaggaaacatcatcaaagccggaacaacttctccatattctctgtattctgagagtcttgcaagcttcactaccggtgagctgtatgaccataaggatgcaaccggattcatcaacctgttcggtctgtccatgaaagtccgcgcaatgatgaatgagaagaacaaaaacaacgacaaataatagttgaaatggaagcggcattcctgttataaaggaaatttcttccgtaaatctttgaaataaaatgggaaatacattacatattattccgcaagtcgttcgcactctattttaacgcaacggtactaagctcctcgcccatggcgactcgctaagaaccggcgttaaaaaaggcttgcttcataatagtaatgctatttcccattttgttttatatatcgatttccagatatgtttccttcataacaggaatgtagcttccagatgatgaaagttttatgtaaaagggaagtggacattattattatgaagcaagccttttcgaatgtcggtacttagtgaaccacggagtggtgaactttagtaccgctacatgagaaacagagcgaaagcgtcttgcggaataatagataatgtccacttccctttttataaaactttcatcatctaactactcaccaggcgatggtttctggcacggtcgatcacgattgcgattgtgatgatggcggctgcaaagagcacctcgatccccatatatacgaatgcttccgatggtatctttgcctcatagtccagaagatcaacgactttgacataccagtaagccggaaggaaatgcgccagcttaatgactcctgctccaagaaattccatcggaacaaagatgccggacaggaatgccataccaagggacactatattgccgatcatgctgaacgcctcctcgtttttggcaatcttgcttgcaagaaaggcaagcgccatagctacaaacatgtagcagaccatattgagcagatttccaagtcctgctgccgtaaacatttcttttctgaatacaaagcatcctccaactgcaaatactgcgcatccaagaaatcctgtcacgatcgttccgagaaggatctcttttgtcatattggaatatttatatgccgagcttgcgatccgttctcttaattcttttttgtcgtaaacgatcaataccggacttacaccctcgatcatcataaccacaagtatccatcccagataactgaaaaatgtgtatctcgtactatgttttccgccatggccttccgttgtcatcgttacgttcgttctagtctgaaacaattcatccacctgagctgctgcctctgcccggtcatatccggctgcaaaatatgcattcagataagagatatatttatttacatctgcttcaaacagttccaccttgctccggttcggaattgcaacgatctcgatataatcggacagatcttccttatccagatgatccgcataaccttttttaatgcggacgatacagtctgtatcccggttaaacagactgtcctgcatcgcttccgtcgtatctgtttttaattcagcatttttatgtgcatgatccagatacgaaaacagttcttcactttctgccgtctggtcataatcaaaccaggcgaatttacacttcatgcttttatattcatcttctgttttgccggaattcggcaatataaatccaaatataatgcctgcaaagatcccaatatacatcagcattgagccttttttcttatttaagattttaaaataggatttaaacacttgcatatttattcctccttaagaccagaatactcgctccaagcaggcagacagccataccggttaagatcaggatatttctgaaataacggtcgtaattatcgtatacattgagtgcataaaggcagtccgttaccagcactgccggattaacccggttcaatatcggaagtttatcttcaatactgtttttaattcccggccccatcagatccgccataaaagagaagatcaggctggccgctaccgcaattccaatctttcctccatatgagcattttgaccaggtaccaagcagcattcctccggcaataccgatattacatgcaataaagagtaccagtaaaatagccggatactttgttccaaactgtacaccgaacagccgcatatagattacagtgataacctcggctgcaaactgaaccagcagtaatgccagatactccgccagaacagtcacaagtttaggattcggtgacagacaacgacgcattccaagtgcgctttcatttgcctgcagcttatgcattcttgtgattccggcaaaggaagaaaacaggcaactcatagcaagcactgcatagaaataattataatactcattctgacatccgtccgttgtggaaatctcttcataatataccgcatcgctctgcactgccttctgaatgatctccgatgcagcctccggatccttctgcatcagattcagatacatctgttccatctgcttatactgattcaggattgattccagtatcgactccttgatgtcactctgcctcactgtcaggctcgcatccgatgtatagatcacaccggtcacttcttcatcatttaacttccgaagtgcttctttctcactgagcacctccatgtcgatccgtttattctcgccgtccatagaaagcgtagacagcaccatcataagcgctgtatcgttcttaccatccctcacaactgcgaccgggatatctttaaacatctcatccttttccatgatatttccgaatgccatgtacatgaatgtgaataatgcgatcggaaacagtatcgtccagaacagtgtatcttttccttttatcagcattttacctgcatatttaaaattatgccaaaacatatccacccctcctaatcccgaagtgtcttcccggtaatctcaaggaacacatcattcagacttggaagctcggtatatactttcccaaataataccgcatgctccttcatatattccataacccggatcagattgtgatctccaccggagtaggtcagcttcaacattccatcctgatatgaactgtcatacacatgtggaagctgtctcagctccagcagttgttcatctgtcagtgccggagcttctatgaagatactctctgtcttctttatcatttttttcagctcttccttcgtgccaagagcgaccttccgccctttatccatgatcaatatacggctacagatctgttctacctcttccatgtaatgagaagtgtaaatgatcgttgcgcccttcttattcagctcgacaattccctctaagatcttgttcctgctctgtgggtctaccgctaccgtcggttcatcaaaaaagatcagcttcggtttgtgtgcgattccacacgcaatatttaatcgtctgagaagtcctcctgacagttttttcggcaggaacttcttatagtcctgaagctcgacaaatgcgattgcatcctctacatactgttttcttgtctctttatccctgatatacaacccacagaaataatcgatattctcatataccgtcatttcatcaaatacagccacattctgcattacaacaccgatctcccgtttcagatcgtagctcgtcgatgtcatcctcttaccaaatatgcggacatcgccctgatcgtatgtaagcagtgacaagatacagttgatcgtcgtcgtcttgcccgatccattcggtccaagcagaccgaagatctcgccctctctcacctccagatcaaaatgtgataatgctacaaaatctttatatcgtttcaccagatcttttacttcaatcgcatattccataactgtctcctcattcattttctattcggatgctattgtttcttccggcatcgcgtctgaaactcatcgcatatgttccatgttatgctgtcattctaccatataccaaaatttttgttcagtgccaatcatcacatctgtaatatgacatttgtcacattcttttaaaatccggagtttttcaaccgtagtcaattgacgctgtatttctcaacaggtatactaataccgtcacttataaatccaagccggttcacgcaattacctgacacccgcgtgacctgtctacatacaaggagaaattatgaagcaaatcctgactcgactgcttatatttgcaatatgctgtattatgtgtattcacactttttctatatgcacgcgcagcgtaatatatattctgcttgcgatcatacttgcttttggcacaatgctgattgctgacaggctcccacccacagctccggtactgatccacgtaggcatatttattctgtgctgtctgtgccttaagtttgttgtatttcttccgcttttctgcttctatctgagcagacgaccggtttgttttactgcacccatcggagttctttccatcattctggcatctgcaaaacttccgatggatactttacttctgataggtgtcctctgtctgtgcagcatattatacggatatctgactacagcgcttaccacccttcatcaacagatgaagcaccttacagatacatcggagacaaacgaacttctggcaaaggaacgaatccgtatgatccggaaggaacaggataacaggatctatactgcaaccctgaaagagagaaatcgtatcgccagagagatccatgataatgtcggtcacatgcttaccagatccattcttcaggttggtgcgatccagacgatcaacaaagaaccgatccttacaaatccgctttccgatctccgcgctacgctggataccgccatgaacagtatacgatcaagtgtccacgaccttcacgatgaatccattgatacgaaagctgccattcaggatatgttgaatgatataacaggctttcatacttcatttgaatatgatatgggcaacattgttccgaaggatatcaaatactgtcttatcagcattgccaaagaagcgatcaccaatgccgtaaagcacagcaacggcgatcaactctcgattctgatccgggaacatccgggcttctatcagttgacgatccgtgacaacggaacaggcattcaccttacaacctcccccggcatcggacttaccaacatccaagaacgagtccaatccttatccggtactttacagatatcaaccgaatccggattccgcctgtttgtcagtattccaaaatatacacaaaaaggagatagaactgcatgaatattataattgttgatgatgatgcatttgtcagtgcatctttaaagatcatattagaatcctgctcagacattaccgtacttgcaaccggagcaaatggccacgatgccatctccctgtacgatacatacagccccgatgttctgttaatggatatccgtatggaaggcatggatggtctgaccgcagcgaaagaaatcatcaccggacaccctgacgcaaagattctgttacttactacctttgccgacgatgactatatcatcaaagccatccggaccggcgcaaagggatacatcttaaaacaggattttgagacagttgcatctgcgatcactgccgtacacaacggtcaaactgtcttcgggaatgagatcatgaacaagatccctaccctgttacagactgatgatcgttttgattacctgtcctacaatcttacggaaaaggaatttgaactgatccgactggttgcagatggtctgaacaacaaagaaattgcggagcagctctttctctcggaaggaaccgtccgcaattatctcagtaatatccttatgaagcttgacctgcgcgatcgcactcaagttgcctgtttttattataagaatttattatgatctgtttttcaatatctgcattcttataagctgataatttgtgtccgttatttattggacgatttttttctgctgatcatcacatatcctgccaatattaatattcctatcacagacaggcatatgcccgccatcagatatggtgtattgtaggtcagtgtaatcacatgttcccctgcttctacaggaacacccatcaggccggttccgatctttacaggagctacttttttgccattaacaactgccgaaaatcccttattgtacggaaccgccagatataaaataccggattcttctgtcgttatgtgaccatttaaagtattatcggtccatccgtcaaatgtcatttgatgtgactctgtatattcttcaaatgctttcactacattctgatctaaggaatacagcgcaaatgctttcgttccctcctgatctttaactgccgttgtataaagacgaattcttatcgcatacattcgaatctgtacagcatccccttcttttacctgacctacatgataaaaatccgctgaatccgtgtaattcgtagacactgttacttcatcattcacctttacttcgatacactgaggcttcgtgtccgcacattccagatacagatcttcgtctttttccgcagtaagattcaccgtgattgctgaaaaaacatcattggtactgatataggaatactcaccgttcttctgtccggtaatatccataccggcacttgttactgcatcctccggtatatcaattcttgtaaaggcattctgcgtgatcttatgtccggtcacaagctttaccagttcattctgattctctgccatgctgcctttctcgaatacatccgatgtatcttccgttttcgctgttccgctccagtcaagaacatctttactcatcaaaaatcccatgcctgccagattatccgcttcgtagaaatcaatcttctcatttttccggtcgatcagacgatacccacctgcaacccctgtttcatcagtcacaacataccgtacattaaagagctggcgactgatcggagttacccctctataggtatattcaatattctgatatcttgatattccaaggctggtaaacacatctactatactgccatttgccacagatgaataccagtttacgtctgaatacggcatatagttctgtgacaccaatgcagtctttctctccccttctgcaagctgcaactgctcataatctgttaaccagtccgaagcagatatctcgctctgaagccgctcatcattatacttctgcggcatctgaatccatgcatttgcaaagatctctatacacaataatactatcatccacacatagcaggtcgtataacgaatactctttctgacatacaagatcaataagatcagatatgatataccaaagagcaatacagccgcataggaataggaattcgcatcttccttatttaagaacagctccaaaaggaatatagtaataccgatacctgacatactgattatctgccatacctttacctgctgtaatctgagcattccgatataacctgccatcaaaatgaaaaagacaaggataaatgcaaaacgatttccgagtccatgcgtaatcgtaaagccatgcaggacataatttaatccgaccatgttcaatccaatagtcaggaataaaataacggccgtatatcgaagcttaaaactacatttgattcccgctccgaataagaaaagcagaaagaacataatcaccagaataccgcaataattattgtgactgaacaaatatcccgtcgatatctgtcgcaatggataaaatgaattaacaaacattcctagattactgattctataccatggaagactatagtccccgtttccacaggatgacagattcataatggcataaagagacggaagaacaaccattcccgcaatcgataccgccataaccgaccatccgaagaaacgacatacaccggaccataaattcttagcattcttccaatcctgcataaaaaaatagcagactataaacaggcaaatataaaatgcaaaataataattaaacaaaaatgcacaggctaataacaacgtataacggagctgccatttgccttccgccagatgctcaactgcaatcgcaataaacggaagcagaatcagtccgtccagccagagcacattatgattatataccaccacataactgtttaacgcatacaggagtccgaacatcatggaaattacagttatatatttctctgacaatcccttttccgcaaatctgcgaatctttgaatgcctgaaaaagaacagtcctgccggagccaggcatgatgctttgagtacgatcatcaatgtcatagataattcaacacgatccggaccaagtactatggctataatattaaacgggctcatgcagtaatagaacatgttcagaacaatatcgattccaagcccccgttcccatataaatgaacctttatcccctgaatgcagccattcaaggaaaattttcagtataccgggatattgatcacatgcatcctgatacagaaagcttctgctgccaaacggatatacatgttctacagccatatttatcatgtaaaatccaatacatatcagaaacaacaaaagatacatcccgcaactgcgtatgtatcttctgttaaatctgtcattgtttatcgttatcgttgaagtaaccggatctgtatcgagttcccgctccccatgaatattttcatttatcttcat

SEQ ID NO: 549 - DNA, 9329 bp, unidentified
  source 1..9329: mol_type = unassigned DNA
ttatcgttttaattttcgatattcgctcggagtaattctatagcgttccttaaacgctctattaaatgttctctggctatcaaagccactatccaaacagatatcaagaattgtatctcccgaattcactagccttgtacatgcatagctcaatctggcatcattaagatactgattgaaattacgatgaaatgttttagaaaatactcgtgacaagacatacttacttactccaagatcatgcgccatctcctctagagaaaattttttcctaaaatttcccgacacataagatactgttctgtatatcaaatcatcactccccacgcaacttttttccaccaattccatttttcctatacatcttgccagcacaatttgaacataagcttgaacaatcataggttcgttttcttccatttggataatcgcctgaattgcattataaacatctggttcaatctgccccgcacgaataaccggatatttaggagcatatccttgtattttatctttaaatactcctgcaaaagaagacggaaccaagatataatccgctcggctcgttttttctgaaaacacttgataatgatgaataatatcagaaaagacaaatccgatatcacccttttccatatgatataattcctgccccactcccatctcaagtgttccttccgttacgcacacaatctccaatgcattatgtaaatgtggagatacatgttttgacactctttgcgccgcatatacctcttcctttgtttccttaaacgtcaaatgcattgatgcatctcccctttattacttaattgttgatttcctctgcaacatttgtctacattttcttttaatttggcaagcattcttatccagcctgtcctataatgaacttgcaaacaaggaaaggaggaatacaaaatgagcagattcaaaaactatatgaacaaccttttagctttctatgaagaatactttgagcatgtatatcatgcataatctggctaaaaggactatttgtgaaaactgaatactgaaaaagcagaccacttcacaaatgtgaaatggtcctttttttatatgcagtccaaaaatcgctgaaaagctgccttaccttccggtgttctcttataaacacctgcacattccaaaacttttgcaaaaacaattcctatttccttttgcacgattgcatgaatattctcttctgtgatttcatagtttggcatccatttctctgcccactctgcatgtgattttgtcaaatcgctttcccgcagatcctcattctgcagaattctacgttccagctccgccatttccatttgcaatctagccgggagaactgccagtcccatcacttcgatcaaaccaatattttctttttttatatggtgatattccggatgtggatgatacacacctaacggaaactcttctgtggtaatattatttcgtaacactaggtctaattcaaacagatctcctctctttcttgcaatcggtgtgatcgtgttatgtggtactccattggtttcgctgaaaataaatgctttttcatctgtatatccacgccagcaagacaggatgcagtcagcagcccctaccaatgactctgtgttattcccttgtagacgaatcacaaacataggccattttacaattcctgcatgaacgtccggaaattgttttaatgaaaattccgtctcatatggagcctttgccattgcaaattcgtatccgcctccttgaaaatgatcatggctcagtatagaaccacctactatcgggagatctgcattcgatcctgccgtataatgtggaaactgccgcacaaaatccaacaatttggcaaaaaccgctttatcaattttcattggaatatgtcgatcattgaaaacaatgcaatgttcgttatagtacacatacggcgaatactgtaaattgtactgttctccacacaatgtaatcggaataattctgtgattttgtcttgccggatgagaaatatgtccggcgtaaccttcattttctttgcatagcaaacaactcggataccccgatttttttgcttttcctgcctttgcaatatcacgaggatctttttccggttttgataaattgatggttatatccattgcaccaaattctgtatttgctgtccatttctcatcctttgcaattcgatcttttctaatataatttgttgcctggctaaactgataataaaaatcggttgcagctttaggagatatattgtatttatcccaaaactgcctgcgaaccacagagggatggggtgtcaatattcccataatctttgtatcaaacaagtccttttccgtaattgtttcttcctccagcatcccctgccgacatgcatattccaacatatcatttaaaatctgtgacaattctctttctgatctaacctctttcgctgttccttcatgctctgtcaattgaaataattccagaaggcgattcgtcacatatacttcatcttccggatcaaccaatccctggttcaatccatacgccacaagttcattgatatactcattaatcatgacactcccccctttacacattctgatatccatttggatgacttttatgccatttccatgccgtaccgataattgtttccaaatctgcatattgtggattccatcctaacacttcccttgcttttgcactggaagcgatcaacatagatgggtctcctgctcgacgtggttcttccttcgccggaattggatgtcctgtcacttttctcgcagtttccacaacctcttttaccgtaaaaccaactccatttccaagattgaatatattgctgtcatttccatcacaaagatacttcattgcaagaatatgagcctgtgcaagatcgtttacatgaatatagtccctgacacaagtaccatcctttgtgtcatagtccgttccataaatagaaatatactctctcttttcatttggcacctgcaaaattaaaggaataagatgtgtttccggattgtgagcctctccaatccttccattaggatgagccccacaagcattaaaataacgcaaggacacaaatcttaagttatgtgcatttgccgtccatttaaacattttttccatagacaattttgtttcaccataacaatttgtcggaagtgtacgatccgattccataataggaattcgctccggttctccatatgttgccgccgtagaagaaaacactatcttatctacgctatgtgcaaccatactctccaacagcacttctgtaccacaaagattattactataatatttcaatggttttatcatactttcgcccacttgcgaattagctgcaaaatgaataactccatcaatattttctttatcaaatacagagtcaataaaagcccggttacgaatatctccttcataaaactttgcttccggatgaaccgctgctcgaaatcctgtttcaagattatctacaaccaccacattctttcctgcctcgatcaactcataaacagtatgtgagccaatatatccagctccacctaatactaaaatgctacccataaccattcctccttgtcttttttgagtatcttacatcacttgaattccaccatatttgcgaattttaagtacatcacaagcaccatctccaaacaccttttccatctctgttttatataatgtaacaatatcatttggtacaaatgcctgtattgttccggcaaagccaccaccatgcaccctgtttgctccctgcacgcctaaaatcatatcactgaccgccaatgcaatagaaacattctgatgttccacatcatggcacacatacacattctgcaaatacttataagaagaatcacctgactctttaactaatcttaaaaattctccaaatctattctctctcaatgctgccacttctttttgcactcgctcattttcacacacatagtgaattgctctaagtgctgcccgatctcctgtctgttctctgatgcgcggaagattagtaagtacttcttttctcgtaacctgtccaagcacttcttttcccaaacaagctgctgctcttttcatttcttccggaattgctgcataatccgatgtcaaatccgcatgtgagccttttgtatcggtaatacaaagactatatccgtatccatccaagtcaagctcaatccgctccaccaatggtgccgccggattctgaaaatcaatatgtgccaaacttccaacggaacacgccatctgatccatcaatccacatggtttcccaaaatatacattttctgcaaattgcccaatcatggctatttcaataggcgaaatctttccatcattaaacaattctgacaggattgttcccatcaatgtttcaaacgctgctgaagaagacaatccagctcctatcagcacatcactggtaacaacagcctgaaaaccacctatctgatatccatattcttttgcttttgccaacacccctcgaattaatgcagttgttgttgcttcctcatcctctctcctacatagatcatccagatatatcgtgatcatctcatatcctgcagatataactctgacacacggttcttccaaattttgtacaatagctattgcatcattgttaatggaagctgccagcacctctccacattgatgatctgtatgattcccaccaatttcacttctgcccggtgcgctaaagacaaagacttctccctctccaaaatgttctgtataactctctatcgccttaatataacgctctctttcatacgctattttcttctcatccacataaatatctttcaatgtttcatcatacattccattttttattttttttatcaaatcatgtgttaccacaaccccatctccttttcttttttgatctttacatttgtctcctccacattcattctggaaaggataaacataataagtacatcaaagatcagtggcagccaaagatacataaactgcatcatattcaacgcggactgtggctgaacagcatgtgttcccacatagccactaagttctaagagccatcctacgaccgccgttccaatacctccgccaatcttaacgccaagtgaagtacaggaatacatcgtaccctccacatgctttccctgtgtcaggtaggtatactcggaacaagatgcgatcactgcattcatgtctccctgccaaggtccctgtcctaatgctgctaatgctgtaaatgccatcatcaaaggaatacttcccatatatccggcaacaactacaagagctctgccaatcacggcaaggatgtaacctctcaagttcagcttatacataccattccactttccaaccagtgttggtgtaaagattaatgcaatgataagaggaatgtttaccgcccaggcaaattgtccaaacagatttttgtttttcaaaacccaggtcatataataaataccggcaccgatcattgcactgtataactgctgtaaaatataagtaccacagatcatcagataaaatttattctttaccagcagcttgaatgcctgaaccagcccatatttttcctcttcacctgttgtgtctccttcatttaattcctcttccggaagttctttaacagataatgcggaaatagtattcacaactaatccgatcactgcataaataattgcaaccatacgccatgcggctgcatctccaccacattttgcaacgaatccaacagtaactgcttgaatcagaagactggttgaaaaagcaaaaatgaaacggtaagaacccatctgcacacgctctttactgttcttggtaacaagtgatgtcagagcagaataagcaatgttatttgccgtataaaacacgccattcaacagcgtatacgcaataaagaaccacgcatactgtgccgtcctgccaagacttgttggaactgcaaaacaggctaccaatgtaattgcacaaccaatgtaaccatacagcatccatggtcttgcctttcccatcttactatgcgtcttatcaatcatggatccaaaaaagatgtctgtaaatccatcgagtaatttggaaacggcaatcagtgttcccactataccggatgccaatccaatcgtatctgtcagatataccatcacaaacgatgtcaggaatgcatacactacatttcccgcaatatcaccagatccgtatcctatcttgttgtaccattttaagtatttcttttcctccataagaatcgctccttcactatttgttatttagaaacaattttaccctcttacaaacggaattaattcaaactgaaactgaaatgcttcctcatcaaaccgatatttatccatgacatccggtccgcagctatttgaaccaattccattcattgcataatccatacagaatacggtgctatccgattctttcaattcataattgtgcgatacccgttccaactcctcctgtgtataaacagaagcgttaaacgaaaatggattctttgaaactgctgcaattccaaattgaccatttgtaagctctacataatcacagtcataatggcttccattctcctgtggacgaatataatcttcatgcatctgagccaccttcgaacggaacaatccatgacaggaagcctggtgtttatcccggtagctttcctgtggtcccattccaaaataagtaatctgatccattttcttattcaaaaacatccgaattccaaaccttggcagatccgggaattctttatcttttactgcctctataaccgcctctattttcccgtcttcattgatcttccatgtcatttccacatccaaaatcttttgtacggtatcagctactactgccagatgctccatgatcagcacaccgtgcttgttctgaagcacctctatacggtatgctctggtataggcagcatcataatgtgccttttcccattccagttttatatacatatcgttatccgtcggagcccgccaaatattcaattccattggatggttaatataacttcttccggcaaactgcatgtcctcaaacaatccggtacgcttatctaaaacataagtaaaatcttttgcctgtaacacgatctgcttatcgttttccttaacagcaatggttccgattactttttcctgctccagccactttacagcctgtctgtttctatcatcctcatttgcaagcttcatttcatcaaaacctaattcatacccctgttcaagcaacggcatttcctttttcaaccggtaaataagcttcagataaatcttaccggtatttggggcctgcagcttcaactccacttccgcatcgctatggggtgatgcaacaacatttgccagttttcctttttccacagtcaagccatcctgtgtcatttcatagaaaacatccacataatccttcaaatcatcaaaatccatataattgtgaagaaccatctgtccgttttcctggtcataagatacgattctcaccggacgatagacatttttatattccagcagtcccgtatgcggcgtacgatccggatagaccagcccgtccatacagaaattgccatcatgaattgtttctccatgatcccctccataataatatctggtctttccattttctgccgttccatgtgcgattgcatgatcacaccactcccagacaaacccgccacacatccggtcatccttatgaatcatctgaaaataatcttcaaaatctcccggtccgtttcccatactatggcagtattctaccagcagaaacggtttgcttccgtcttttttcagataatcctctatctcctgcagtgacggatacatccggctgtaaagatccaaattgtcataatcataggtaatatcataattacggtatcttgcactttcgtactgcgtgattctgtccggatcaaacttctttgtccatgcaagcgccttttcaaaattacatccatacgcactttcatttcccatagaccacattacaatgcttggacggtttttgtctctctgtaccataagctggacacggtccacaattgccttttcccatgccggatcatctgcaatcttttcattccaatggtgaaaacggttctggtctgtatcctccttccggtacagcataaatggtccatgcgcctcaatatctgcctcatcaatcaccataaatccatattcatcgcacatctgataaaaatatggtgcatttggataatgactggaacgaatagcgttaaagttatgctgcttcatcaacattaaatcctttttgatctgccggacatcgatcacaaatcctgtctccggatcagaatcatggcggttgactccacggaatttaatcttttctccgttaaaataaacaactttgtccttaatttcaatcgtccggaaaccaatccgatcaacgatcacttcatccggcattgtcaaaataacctgatacaaataaggattctccgcattccataaaaccggatttaacacggtcagttctaacacaccattctctgctgtttcccctcttgctacgactgctccatatttatcttctatagtaactttcgtttccaccggttctgcaaaatgcatatccaatttcacaacaacgctgtctttttctacatctgtcgtaatgtaataatctctgattgtcgtttccggtcttttcagcaaataaacatctctgaaaatgccactcatccgaaacttatcctgatcctccaaatacgatccatcacaccatttgagcaccaaaaccgctaatgtattttccccttcattcaacaagtctgttacatcaaattcactggtagcgtgaggcacctgactgtatccggcataagcaccatttacccatacataaaaacagctatcgacaccttcaaaattcagaaatgcttttgatgcctttttttctctgtgatattcaaagttatgaacatatgctccacatggaatatcctgtggcacatatggtggatcgaatggaaacgggtaacgaatattcgtgtactgatgcgtgtcataaccatccatctgccatacacccggaacagttacctgatcaaacccggaaacatcatagcctttctcataaaatgattccgttacgtcataaatgctgttataatactgaaacttccactctccgtttaacagctgaaaacgatccgatctttcccgatgctccactagatcattcatacgaactgatgccggaatgtaatatgtccttgccggcattgtcttgtcatgcataacattcaaatcttcataaaagcgtggtacgagcat

SEQ ID NO: 550 - DNA, 8457 bp, unidentified
  source 1..8457: mol_type = unassigned DNA
atgacattcctcattcagcagacgctcatttatgccgtccctctgatgatcgtggcgcttgcgggcgtgttcgccgagcgcagcggtatcatcaacctggcgctcgaaggtatcatggtcttcggcgcattcatcggcgtctggttcgtgcgcattttgcagacgagcgacgccatcctctccctcaagcagagcggcaactgggtcgcacttcagggcgtggagcttctcacgatgctggtcgcggcggccttcggcgcgctgttctcgctgcttctgagctttgcctctatcaacctgcgtgccgaccagaccatcggcggcacggcgctgaacctgatggcccccgcactggtgctgttcttcatccgcatcatcgccaaccagaatacgctgcagatgctcacgggcgacgcggcgagctggttcatgatcaaaaagtctacgctcggcatcgacaagaacaccgacctcggctttttcggcgagacgttcgtcaacaaggtctaccttgcgacctacgtctgcatcctgcttttcatcatcctgtcgatcctgctctataagacgcgcttcggcctgcgcctgcgcgcctgcggcgaaaatccccaggcggcggattcgctgggcatcaacgtctacaagatgcgctacgcgggcacgaccatttccggcgcgctcgcgggcatgggcggcttcgtctatgcgctgacgaccgcaaactgcgcctcgaacggcgacgtggcgggcttcggcttcctcgcactggccgttatgatcttcggcaactggaagcccgtgaatatcgcggtctcctcgctgctgttcggcctcttcaagtgcatcgcggcgagctacgcgagcatcgacatcaacggcgacggcgtctacatgctcgccgagatcggcatcagcgcccatctctaccgcatgctgccctacatcgtcacgctgcttgtgctggcgtttacgtccaagagctcccgcgcccccaaggccgagggcatcccctacgacaagggccagcggtaacgtacatcaaaaagcggtatggcagtgccataccgcttttttgcaaacgaaatctatggagagaactatggagatcagagaaattacgactcccgatgaaaagcggcgcattacgcgcttgattttagaatcgctgcccgactggtttggtattccggaggcgcgcgaggaatacatcgaaaagagtgttaagcagccgtttttcgccgcgttcgacggcgagaacgccgtcggcttcctttaccttgccgaaacggggaaggatacggcggaactctatgtcatgggcgtgctgaaagaataccaccgccgcggcgtcggcaagatgctctttgccgcagcgaagcagcgggcgaaggagcttggctactcgtttttgcaggtcaagaccgtgcagatggggaagtaccctgagtacgacgcgacgaaccgcttctatctcgccctcggttttggcgagtttgaggtattcccgacgctctgggacgagcggaacccgtgtcaaatctacgtgatgagcctgaaataagaaaatgttggaactttttcccgccgttttgcgtctataaaagcagaaaaacaggggagggaagcatatgaccgtccgcgaaccgaaaaaacgctctaatttgcggctgaagctcggcggtgcgtatttcagcgcgcagcgaaaactcagatggctttcgatgcggaagcattttgcgcgcgagcgcagcggggaagacttagcatatcaggcgttttcccaccatacgccgctcatgcgaaagctcaaggacgtcgacatgcagctccagcgcaacaaggtgacgaatctccgcctcgcctgtgcgcggctcgacgggcttttgctgcgccccggtgaaacgatgagctactggtatctcatcggaaagccgacggcggggaaggggtatctgcccggcatgatcctgcgcaacggcgggtatctggccgcgacgggcggcgggctctgccagctctcaaacctcatctactggatgacgctgcacacgccgctcacggtcgtcgagcgccaccgccacggctacgacgtctttcccgacgcgaaccgcacgcagccattcggcagcggtgcgacctgcttttacccctatcttgacctgatgatccgcaacgacacacaggacacctatcagatgcgcgtccgcgtcggcaaaacagaccttgagggcgagtggcgcgtgagcgccgagccgaccgagcgctatgcggtcgtagagcgcagccacgagatgcgcgcgcagtactggggcggctacatccgtcacaacgagctctaccggcagacgtttgatttgcagggcaagctgctcgcggagacgcctgtcgccgtgaacgacgcggtgatgatgtattcgccgtatctggaagaaagcaaaaaggaaggctgacaaagtcaaccttccttttatcttattcagccgtttcgtccgcctcttcgggcgtatcctcttcctcgggctcttcccacggctgcatcgtggcgacgcagcggttgatgttcttgccctcggcatagaatttggcctcgtagtcggtcatcacgccgcgctgtccgttcgcgtgcagatcgcgtgtgacctcagagagttcgaagccgaactgcgggatctcctcgatcgaccactcaaacagcgggtcgttgtcggtcttgaaatgaatttggccgttgtccttgagcaccttgcggtagagcttcaagaaattgccgtgcgtcagccggcgcttggcctgccgcttgggaggccacgggtcgcagaagttgacatagatgcggtcgacctcgccctgatcaaaaatctcagggagctggttggcgtcgatgtcgatgaagaagacgttgtgcagctctgccttcgccgcgcgctccatcgcgacgaccatcgcgtcgggcaccttttcgaccgcgatgagcagcacgtcgggctccgccgcggccgtctcgacggtgaagcggcccttgccgcagccgagctccacgcggacctccttcgcctcgggcatcaagtcgtgccagcggcccttgcgctcgtaggggtccttgatctgatacgccccgcaccgctccatgcgggggagcaggtttttctttttgcgcattcgcatagaatgaacctcgttttcctataattaaagcctatcatatcgaaaattggtgcaagagacaagtcattttaaaaattttatacaagagttgctgcattgggagaaaagatcattaaaaatgcaacgtttcttgcaatgacatcggaaaagtgtgaaacttttttgaaaaaagtgatttttctcttgcaaatatgccttgccgcccatataatagggggcagttgaagaagacaggaggagacacacgatgtcttttgtcaaatatgaacccaagggcaacattgcctatctcatcattgaccgcgaaaaggcgctcaacgcgctcaattctcaggtgctcgccgatctcgatgccgcgctcgacgcggtggacttaagcgagatccgctgcctgatcgtccgcggcgcgggcgagaagtcctttgtcgccggcgcggacatcgcgcagatgaaggagctcagcaaggaggaggccgaggccttcggcaagcagggcaacgacgtcatgcgcaagctcgaagcgttccccatcccgacgatcgcggcggtgggcggctatgccctcggcggcggctgcgagctcgcgatgagctgcgacttccgcatctgctccgataccgccgtcttcggccagcccgagacaggccttggcatcacgccgggctttggcggcacacagcgccttgcccgcctcgtcggccccggcatggccaagcagatgatctacaccgcccgcaacatcaaggcggacgaggcctaccgcatcggccttgtcaacgcggtctatccgctttctgacctctacgccgcggcggaaaagctcgccggccagatcgctggcaacgcgcccatcgcggtgcgcgcgtccaagcaggccatcaacgacggtcttcaggtcgacattgaccgcgccgtcgtgatcgaggagaaggccttcggctcctgcttccagagcgccgaccagcaggagggcatgggcgccttcctcgaaaagcgcaagcacgagccctttatcaacaagtgattccatagaattatctatttatattgtaggaggatacacacaatgaaagttgcagttttcggcgccggcaccatgggcagcggcatcgctcaggtcttcgcggccaagggccacaccgctctgatgtacgcttccagcgtcgcttccgctcagcgccacaaggataagctcgccgcttccctgcagaagcgcgtcgagaagggcaagatgaccgaagaggccaaggacgccatcctgaacaacatcctcgtcgaggagaagtctgccgcggcggacgccgacctcgtcatcgagtgtgtggcggagaacatggacaccaagcgtcagctcctcggcgagctcgacgcgatgtgcaaggagagcgccgtcttcgcgaccaacacctcttctctgtctgtcaccgagatgggtctcggcctcaagcacgccgtcatcggcatgcacttcttcaaccccgtgcccagcatgaagctcgttgaggtcatccgcggcgccaacaccacgcaggagaccttcgacttcatctacaacctctccaaggagatcggcaaggagcctgtcgaggtcgctgaggctccgggcttcgtcgtcaacaagatcctgatcccgatgatcaacgaggccatcggcctggtcgagaccggcgttgcctctgtcgaggatatcgacaaggccatgatgctcggcgcgaaccaccccatgggccccctcgccctgggcgacttcatcggccttgacgtgtgcctcgccattatgaacgtcctctacagcgagaccggcgatccgaagtatcgtcccgctctgctgctcaagaagatggtccgcggcggccagctcggcaagaagtccggcaagggcttctacgattacagcaagaagtaatccgtccctaaaaggataaaaaggagaggcagtttacaaaaactgcctccctttttctcttttggaatggaaaggattcctgaaaatgacagaaaactgtcataaaaggaacggaaatgtcaaaaagactttaatgaattcggcgaaaagcacgaattccaaaaaggaatgatagttcctcttgcgaaaataaaacgcacaggatataatgtaagtcacggaactgatttgtgaaaaattagacaatccaattatttttatagtgaaggagcaaaagactatggatttccatctgtccaaagaacatctgctggtccgcaaaatgtatcgcgaatttgcagaaaatgaagtcaagcctttagctgaggaactcgatgaggaagagcgcttccccatggagaccgtcgaaaagatggccaagctcggcatgatgggtatttacttcccgaagcagtatggcggcgccggcggcgatgttctcagttatgccatgtgcgtggaggagctcgctaaggtttgcggcaccaccgctgttatcgtttccgcccacacctccctctgctgcgctcccattttcgagaacggcaccgaggagcagaagatgaagtatctgcctgaccttctgtccggccgcaagatcggcgcgttcggtctgaccgagcccggcgccggtaccgatgcctccggccagcagaccaccgctgtcaagaacgagaacggcgactacgtcctcaacggcagcaagtgcttcatcaccaacggtaacgttgcctccactttcgtcgtgttcgccatgaccgacaagagcaagggcaaccacggtatcaccgccttcatcgttgagaaggacttccccggcttctccaccggtaagcacgagaagaagatgggtatccgcggcagctctacctgcgacctcgtcttcgaagactgcgtcgtccccaaggagaacctgctcggtaaggaaggcgaaggcttcaagatcgccatgaagaccctcgacggcggccgtatcggtatcgcctcccaggctctcggtcttgccgaaggcgccatcaacgaggctgtcaagtacaccaaggagcgtatccagtttggtcgccgcctgagccagttccagaacacccagttccagctggccgacatgcacacccgcacgcaggctgcccagtacctcgtttacgctgccgctatgaagaagcagaatcacgaggattactccatggacgctgccatggccaagctcttcgcggccgagaccgcttccgacgtcacccgccgcgctgttcagctcttcggcggctatggctacacccgtgagtatcccgttgagcgcatgatgcgcgatgccaagatcaccgagatctacgagggcacttccgaagtccagcgtatggtcgttgccaagtatcttggtgtgaactaaaaaaggaggtaaagatataatgaagattcttgtttgcgttaagcaggtccccgatacctccggtaaggttgccgtcaatcccgatggtaccctgaaccgcgcttccatgcagaccatcatcaaccccgatgatatgaacgccgttgaggccgctctcaagctcaaggatgagctgggctgcaaggtcaccgtcgtcaccatgggtcccccgccggcagaaggtatgctgcgcgagctgatggccatgggcgctgatgacggctatctcgtttctgcccgtgaattcggcggttccgatacttacgccacctcccagatccttgccgccgctctcgacaccatcggtctcgatgacgacgacatcgtcttctgcggccgtcaggctatcgatggtgataccgctcaggtcggtcctcagatcgctgagaagctgcacctgccccagatcacctacgccgccgatgtgaagaaggaaggcgacaccctgaccgtcaagcgcatgctcgaggacggctacatgaccatcaaggctcagactccgtgcctgatcacctgcatcaaggagctcaatactccgcgttacatgagcgtctccggtgtgtttgagtgctactccaagcccatgaccgttctggactacaacgccctgaaggatcaccccctcatcgacgctaccaccatcggcctcaagggctccccgaccaacatcctgacctccttcacgcctccccagaagggcgccggtcagatgctcgagggcaacgacatggctacctgcgagaagctcgccggtatcctgctcgaaaaacacatcatttaaggaaaggagatcaatacgatgcgtaacgaagtgaaacttgctaatcccaactatgactcctccaagatcgaagagttcaagaacgtatgggtcttctgcgaacagcgtcagggccagatgatgtccacctcctatgagctgatctccgaaggccgcaagctggcggacgagctgggcgtgaagctctgcggtctgctggtcggcgacaatgtcggcgatctcgccgagagcattggcggctacggcgctgatgaggtcatcgtctgcgaccaccccctgctcaagaactacaccaccgacgcttattccaaggtcatctgcgacgtcatctccgagatgaagcccgaggccttcctcatcggcgcgaccaacatcggccgtgacctcggcccccgctgcgcagcccgtctgcacaccggtctctgcgccgactgcacccacctcgacgttgacatgcccatctacaaggacttcctgcgcggcgcttccacgctgcccgaggccaagatcgacggcatggccaccgcgaaggtcatgggtaaggaccacgatgtctctcgcgacctgaagatgacccgtcccgcgttcggcggcaacctgatggctaccatcatctgcccgcgcttccgtccctccatggcgacggtccgtcccggcgttatgaagaaggctgcttacgacgaggcgaaggccaaggccgttaagatcaccaagtacgacgtcaagctcgacgccgccgatctccagaccgaggtcgtcgaggtcgtcaaggctgccaagaagctcgtcgacctggttggcgctgactacatcgtctccgtcggccgtggtatctccaaggacgtcgagggcggcatcaagctcgctcacgagctcgccgatgtgctcggcggcgttgttggcggctcccgtgttgccatcgactccggctggctcactgccgaccatcaggtcggtcagaccggtaagaccgtccacccgaaggtctacgttgctcttggtatctccggctccatccagcacaaggccggtatgagcgagtccgagtgcatcatcgcggtcaacaagaacgacaccgcgccgatcttcgagatcgccgactacggcatctgcggcgacctgttcaaggtcaccccgatg

SEQ ID NO: 551 - DNA, 9031 bp, unidentified
  source 1..9031: mol_type = unassigned DNA
tcagatacttgtatcttcaaacttatacaattcccattctccggctttccggcggaaataaaggatattggaaaaaccattgccgatacctttcaacgccaaaattttcgtgggcgaatcatcgccattccgctgtccgtaattaatattagaaaggcggtcgacaggaagtaccggtttgaaggcaaaccactgattaagatcgagggttgtctccaaaatggagaaatcatcgtccggatcgctggttacaaaagctaacggatccctcacacgctgactctgaaaaagactatccgttgcaaaatgtccgaaaaactcaacaaagttctcattatcactttgctcaataggccgcaggttgattgcctccagcatccatgcacctttgatacgttcaaaatagtatcttttcaccattcgcgttttcacgaacatccactctacctgcacagaagtgagggaggtatctcctactaaatccatgtcttcttctctatcaaacagcagagtataataatgctgcttggtaaacaagtcatcatgcttccagttgcgttcctcgatgtttgatttcttatctccattgtagtagggcaatggaaatttcacacgctgacgctgtaacacttcatcggaagcaaaattgtagataaaatcatcgaaagattcatctgcctgtataggctgcggatcttccggcgatttatcatggtggctagaatcggctatctgccggattgaatccacctctttagtaatagatgcgaaagggtcaatatttgttttcttgtttccacaagagctcaatataccgagcagtatgacccctgcaattagttttttcattatttcagtttctctcttaacttttcaagcatatctaccgtcatgctttccaaattgtaggccggcttccatccccactcttcacgagcgcaggtatcgtccaggctatcgggccagctatcggctatacgctgtttcagaggatctatatcatagatcatctcaaactgcggcacatgcttcttgatagcctgatatatcgtttccgggtcgaaactcatggaagcgatattgaaagcattgcggtgtatcaatcttgccggatcggcttccatcagcgtaattgctgcgttcagcgcatccggcatgtacatcatatccattaaggtgccttgcttaatggggcacacaaacttttctcctttcactgccgagtagtaaatatcgacagcataatcagtcgtacctcctcccggaggggtcacattcgaaataatgcccgggaaacggacagcacgggtatcgacaccgtatttattaaaatagtaatcactcaataactctgtcgttactttggtgactccatacatggtacgcggacgctgaatggtgtcctgcggtgttttcgtgtgaggcgtactagctccaaacgaaccgatagaactcggagtaaacactgcgcacccttgttcacgtgccacttccagcacattccacaatccgtcgatgcctattttccaagccaacttgggtttcgactcggcaactacggacaacagagcagccaaattataaatcgtatcaatgtgatactcttttactacagatgcaattgcatcgccatctgttacatcagcaattgccgacggtcccgactcctttaattcccctttaggttctgcacccggaatataacctgctactacatttgcatttccgtaacgtttccgtagctccatcgttagctccgaccctatctgtccggtagctccaataatcaaaatgtgttccattttttcttctgacttagaatatcaagcttaaatagtgcgcaaagtaagcacttttttttcagattttaatcaaaaagacattgttattccaagaaaaattgtgtcctttgcaatataacttaatcacccaaacactatgtacggtaaaatgcaagaatatctccgccaaacattggctgaaatcaaggaagccggactttataaagaagaacgactgattgaaagtgcgcagcaagctgccatcgctgtaaaaggtaaggaagtattaaacttctgcgcaaacaactatctaggattgtccaatcatccccgattaatcaaggcttcacaggaaatgatgaataaccgtggatacggaatgtcgtctgtccgtttcatttgtggaacacaagatatacacaaagaactggaagctgctatctcggactatttccagactgaagacacgattctgtatgctgcctgcttcgatgctaacggcggtgtattcgaaccgcttttctccgaagaggatgccattatctcggattcgctaaaccacgcttctatcattgacggggtacgtctttgcaaagcgaaacgttaccgttatgccaatgctgacatgaaagacttggaaagatgtctgcaagaagcgcaggcacaacgcttccgtattattgttacggacggtgtgttctcaatggacggcaatgtagctccgatggatcagatttgtgatcttgccgagaaatacgatgcgttggtaatggtggacgaatctcactctgccggtgtggtaggtgccactggtcatggcgtaagcgagttgtataagactcacggacgtgtagatatttacacaggaacgttgggtaaggctttcggcggtgcactgggaggatttaccaccggacgcaaagaaatcattgatttactccgtcaacgcagccgcccgtatttgttctccaattcattggctccgggtatcatcggtgcaagtcttgaagttttcaagatgctgaaagagagcaatgcactgcatgacaagttggttgaaaatgtaaactatttccgtgataagatgacggctgccggatttgatattaaaccgacacaaagtgctatttgtgcggtaatgctgtatgatgcgaaactgtctcaaatttatgctgcacgcatgcaggaagaagggatctatgtaacaggtttctactatccggtagtgccgaaagatcaggcccgcatccgtgtacagatttctgcaggacacgaaaaagcacatcttgacaagtgtatcgctgcctttatcaaggtaggtaaagagcttaacgtattgaaaacggaataactccgaagcaaggtttccttgcagaatccatttttaggcacggattacacggattacgctgttgctttatgcaagcatatttctaaaaaccgtgtaatccgtgtaatccgtgcctaaaaaatctcttttatttaatgaattttgaaccgctgcttaactataaaaagattatggaagaattaaccctcactactcctaccctgcttttctcggcagtttcattgattttactagcttataccaaccgtttcttatcgtatgcccaacttgtgcgccaactacgtgaccgctacgtggaaaacccttcggatatcactgaagctcaaatcgagaatttacggaaacggttgaatctgacccgtacaatgcaaggactgggtattgcaagcctttttctctgcgtagtcagtatgtttcttatttatatcggactgcaattattttccgcttacgtattcggactggcactgattctgttgatagcttctctaggcgtatctttccgcgaaatacagatttccacccgttcactggagatttacctgggaacaatggagaaagggaaaaacaagaaataatacggttgacattcccttccattagtttttatcaagacactacccagcaaggaaggatgaccgtaaagcgacttcccttgcctacttcggatttgagttcaatccttccacccaacttttctataatcacctgacaaatagaaagtcccaatcctgctccctgtgagaattcgttctgtttgtaaaaacggctaaaaatcatccgttgttcttcacgtggaataccctttccggtatcttctacataaatccgcacgttaccttcatccggcagataaatataccctaatttgatatacccggtttccgtaaacttactggcgttattcaagaagtttgttagaacttgtatcaaacgctctctatccacattaatctccaaaggtatattatccacttctttcaggaattccagacgtggagcaatcaatacctggtgagtcatataaatgtcatcaatcagctctctcaccctacatttcttgaatgagaaagacatatagcctgattcgatacgggaaagctccagaatatcgttaatcagtttgagcagcaactcgctgttcttgttaatggtaccgatgtattcttcgcgttctacggaactcaacccatcttccaatgccagaatattggcaaaaccaacaatcgaattaagcggagtacgtatctcatggctcatatttgccaggaaggattgtttcaattctgccttttcagcgagcaagcgcgcagcttccagttcctcttcacgatcctttatatcttgtatgttgagcagcaaacctgctgttttatattcgccacccggtagctgtttagtagtataacggaactcccaccactgatatcctttaccgtcgaagttacaaagctcccgtactactttcttttgggctgttttcagattttgccagttgaacttcactccttcccaatgatcgggatgaataaagctcatgaattccttaaacgaaagttgtctaggattcagcccttgcgacgaccagaatgcatcttcaaaaacaaaacaaccgttatccaatctccaagcatacgtcattccaccctcaatagctaatgacaatgtttctttttcatcagccaatgctataagcgcctgtttttttctcgtctgttcccgaaggtataaccaccaaagcgaagcaaaaagaaatgtcaggaaaagaattagtgaagcgactaaagttccccaaagaaatggatacttgtctctgaacggaatattaataatgctatattttgcaggaatactttccttgcccaagccaatttgtttcattgtattccagtctacgacatactctttccgactttcaacaatgggtatatccgaggggcttgtaccatgtaatatgcgaacggcagttttcacttcttcttctacctgaataggtagcgaagtgatgtatccacccaacaacttctcaccaaacccaaaggcttcattaatggctgtcagactgggactaccgcagatgcttccaatattaatagtggtgtaatcacgtttcaactgaatataacattggtcgcggtagctcctgtttaaaacccacataaaagtggcatccgaatgatttctggcattacgcaaaggaatagccatgaagcgggtataaccttcttcctgcaccaaacgtatctgttcttccggagaaagttcaggattatctatgaatccggtcactttacatcctttaaactgctcctttgcatctcttctgatttgtttgtcgatataggtagtgtcgagcatggtaaacaaacggacgtgctcaccgaagagctcttttgccacactgatattctcattaaaggctatcttgtcatgaaaacctgtcacgttgggatgatgtttcaacaatccccaattcggataattgacaccaccaaaaaccacaggcacttctttcgccaactgaattccacatttcatcaatgaataagtggcttggtcttcattcaccagaatcacttccggtcgccagtctctcgaaacggaatcaaccagaaagcgcatccgttccagttccggttcctcccaataagattcacagtctaaataaacggtacaaatatcagcatcaattttctctttttcaaattgctccgctatcatccggttaaattccggataagctgcataagtttcctcataagagtggacaactaaaatacgtcgttcctctttttgagaacaactactcacccctaaaaggagcgataaagataaaaggagcaatcttacaattcctctgttcaaaccattcatttataataaccgggattaatttctctctgactcgtaatacaaaggtagtttattttcgaacataagccaaataagtgaaaaaaaagaagctgcccgaactggaattcaggcagcttctataatatattaaagaactattttcagagtaacatcattaacgctgtcccaattgtgagtctacaaagaaaattccggtatcaccggctttcttgatcttgtcaacaatgccttgtgctgtagcttcttcttctacttgttcacgaacaaatccccacaagaaatcctgtgtcgctttatccttttcagcagcagctacgtctaccagcttgtctaccaattgagaaacatgacattcatgtttgtaaacgtgttcgaatacttccaaaggagtaccccatccgttaggaacaacatctattttatcaactttagcagctcctccacgcttgataatataatctgccatggcataagcatgtcccatttcttcttgagattgctttttcatccaatgagcaaatccactgaaaccttctctctcgaaatagaaagacattgctaaatacaggttagcagaccatatttcagcagtaatctgttcgttaattgcattctgtaatttttctgaaatcataatcgtattttttattaagttgttaatgtagtttctttttgaactcattacaaaaataacaagctttcagttaaaattgttccacgcaccctacatttttaaactacattcacactttgattgtagcggttcactttttacttacaccagttcgtcagaggtatatcctttcggcagttcacggcagttatatccggaagccattatttcaccataagcaccggcagagcgaagggctatcaagtcaccacgcttcactttgttcaggtcaatcgcttttccgaaaacatccgacgattcacagatcggtcctaccacgtcgtatgcttccaatggttcttcggaagtaatattttccattttatggaatgcctgatacagagccggacggataagatcggtcatgccagcatccaagatggcaaatttcttccgagcaccttgttttacatacagaactttagaaattaaggaaccgcactgtcctacaacagcacgccccaattcaaaatgtaacgtctgataaggacgcaatttcagttgcccggcataggtagcaaaatagtctttgaagttcgggatagcctgacggttgggatgtccatagtcaatacccaaaccacctcctacgttaatatgttctaccagaattctgcgagcttccaatttatcctgtaattcattaacacgattacagagagctacaaaatcgcccatatccagaatctgcgaaccaatgtggaagtgaaggccgataaactttacgtttttcatctcctgtgccacatctatcaccttgtccatatcctgcatactgataccgaatttgttttctgccaaaccggtagtgatatttgcgtgagtatgtgcgcctacatccggattgatacggaaagcaacattagccaccttattttgagcagcagccaattcattgattacttccagttcgggaatagactctacattgaaacagaagattccgtactccagcccgaggttgatttcccagtccgctttacctactcctgcaaaaacgactttattggccgggaatcctgcacggatagcggcgcggatttctccaccgctcacacaatcgactcccattccgctctcacggatgatagtaagtactttcgggttggcatttgctttgacagcgtaatgcactgaataattaggatatttggcaacctcatggttaatagccgacaatgtatcacgcagcactttggtatcgtaataatagaaaggtgtctgcaaagtgcggaatttatcgattggaaatattcccttcataattcgaaaaacttgtttagttggttaaaaaagagcgcttttatcagttcggtaaaagcgctcgtgttatttatggaattacttgccgttgaaaagcatatcgctcaacgattgtaaagctactttcttatcgcactcccgaatgaggaaggagatattgtagttacttcccccaaacgaaatcattcgcaccggtatatcacgcatcgcatcgagtgcttttgcttcaaaaccgacattttcccattcaaggtcacctacaacacagatgatacacattcctttatcaacggttactgttccgtatttcttcaggtcatccagaatctcattaagatgtttcgtgttatctatcgtaacagatacaccgacctctgacgtacagatcatatcgatggatgtctgataactttcgaagatttcgaacaccttacgcaagaaaccgtgagccaataacatgcggctggatttgatcttgatagcagtaatgttatcttttgcagctactgccttgatcttacctttttccgtatcgttggagattagtgtacccggagcttccggatccattgtgttcaacagacggacagggatattggcatatttagccggctggatacaagtagggtgcagaatttttgcaccgaagtaagccaactcggctgcttcctcaaaatgaagctgacgcaccggagcggtcttgtcaacaatacgcgggtcgttattgtgcataccgtcgatatctgtccagatctggatttcggaagcgttcactgctgcgccgatcagagaagcggtgtagtcgctaccaccacgttgcaggttgtctatctcaccgtaagcattgcggcagatgaaaccttgcgtaatgtagatctccgtatccggataaagatcgagttgagcacgtaacttatccttaatatatacggggtccggttctgcattcttatcagtacgcatgaattccaaagccggaagcaacacggacttcacaccacattcctgcaggtagaagtttaccatcgccgtagaaataagctctccctgtgccaaaaccactttctcttcgaacaaagtgaaaaggtc

SEQ ID NO: 552 - DNA, 7210 bp, unidentified
  source 1..7210: mol_type = unassigned DNA
ttatattttctctctcaagtattcgtaaaagctatattgcgaccgtaccttctccttttgcggtcgcgacgacttccagcggtttcgcaaccggtcgtccacaaagcaggctttccgtttgtccgacagttgtatggatagcatatcgatgagctcttgcttcaagtccgggtccagaatgggggtgacggcttcgatacggcggtacaagttacgccgcatccagtccggcgagccgaggaagagcttgggtgcgccgccgttgccgaagtaccacacacgggcatgttccagaaaggtatccacgatgcgtgtcacgcggatgttgtggctgtactcctgcccggggatgaggcagcagatgccgcggacaatgaggtctatctctacaccggcttgcgaggcttcgtagaggcggtctatcatggcggggtcttgcagggcattcatttttaggataatccgtccttgcttgccttgccgggtcagttctatttcgtgattgatgaggcggttcagttcaggaatcaggttgaagcgggccacaagcaggcggtggaacactggattttcctttccctgcagagtacggaacaagttgtgcaggtcgtttacaatcaccgggttgcaggtgaatagtccgctgtccgcatagagggtggcggtcttttcgttgaagttgccggtgctgatgtaggcgtagcttgtcagtttgcgcccttccttgtcgcggcgtagcacgagggctactttggcatgtacctttagtcctggtatgctgaaaatgatgttgatgccggcggctttcatcatctcggcggtggcgaggttgttttcttcgtcgaagcgggctttcagttccacaaagacggtgactttctttccgttctgtgcggcggctattagggtgttgatgacggtggagttctctgccacgcgatactgggtcaccatgatttcacgcacggtgggttcgtggacggcttcatatagaaaatggatgaagtggtcgaaggagtggtagggataatgcagcagcaggtccttcttctccacatagcggaagatggattcgcgttcgtccaggcaggtcagcttcatgggctggggtttcttgatgggacgtacgctttggttgggattaggcagatgccgcaaatcctccatgttgaggtgcttgtctcccggcaccagctcccggcggtctatgcggtaggcatctaccagaaagtcgaggaagtcctggggcatggcgcggtcgtatacaaaacggcacacggcgcctatcttgcgtttctttaccttcttcttcacctgctcgatgatttcggaggtattggcggcatcgtctatcagaatatccgcatcgcgtgaaatcttgatgcaataactgctgtccacttcataaccggggaagatggtatccagattggccttgatgatgtcttcaatgaacatcagataatagtctttccccaccttgggcagctggatgaagcgcggcactttgctgtacggcagtttcatcacgaaatactggatgcggtttggagaactggcgggagctcctttcagatgaagccgtacggctagatagagacggttgtcgcgcaggaatgaaatcaccttgtccttgcttacgggcaccggggccagataagggaatatctcttcgcggaagaagttgcgcacgaagtcgcggtgaaacggttctacgttgcggctttgatagaatatgatgtgatgtttccgcagggcgggcagtatcttctgttcgtagatgcggatacgttcctccagttggcgattgacttcttggttgatttcatctaccagttcggcggcagactgcatagtctcttcatcgctttgcgaggctccggtggctatggccttatggtcggctacgcgtatcttgtagaattcttccagattggaagagtatatagaaataaagttgatgcgttcgtatagcggcaatgtctcgtcttccgcttccagcagtacgcggtagttgaaggaaagccagctgatgtcacgtttgaaatatctgttgtccatggtgttaaggtgttaatgtggcatattagcacattaccacattgtattcttcccaaatataattacctttgtcttaataaacaaaggaaagatgacaaaagttggtttattatcggatacgcatggctactgggatgaaaagtacctgcaatattttgagggctgtgacgaaatatggcatgccggtgacatcggttcgctggaagtggcacagaagctggcggctttccgtcccttccgtgccgtgtatggcaatattgacgggcaggagatacggcagctctatccgcagattctccgtttcacggtggatggggcagaggtgctgatgaagcatatcggcggttatcccggcaactacgacccttccatcaagggcagcattctggtgcgtcccccaaagctgttcatcagcgggcactcgcatatactgaaggtgaagtatgacaagacgttggatgtactccacatcaatccgggcgctgcgggcattcaaggtttccataaggtgcgtacgatggtacgctttgcggttgatgggggaacgtttaaagatttggaggtgatagaacttgctgaccgatgatgtagtttgtttattttcaatggattgtatttaccgattgcttgcgctatagtgtaaaagccgttacatgctaatgtaaaggttgttacgctattgggtaaaggccgttacactatttggtaaaggtcgttacacgctgaggtaaagaccgtttcatcaaggggtgacggccgttacgcactgaagtaagcaaaacaatgtaccggagtaagcaaagcaatgaagtaaaaagatgaaaccaagccttcacttaatcgaatttttccattatctttgtacccgaatagcaagtagagccgtggggcatcgtcctccttcttattttattctccattttgaagtatcaccgaaaaagaactgaaatatgaaaggaattattcttgcaggtggcagtgccactcgtctctatccgttgtccaaggctatctccaagcagataatgcccgtctacgacaagccgatgatatactacccgctctctacactgatgttggcgggaattcgcgaagtgcttattatctctactccacgtgacttacccatgttccgcgaactgctgggaaccggcgaagaactcggcatgtccttttcctataagatacaagagaatcccaacggactggcacaagcctttgtgctgggtgcagagttcttggacggcggaccgggctgcctcatcctgggcgacaacatgttctacggtcaaggcttctccgccatgctgaagcgtgccgcttccatagacaagggtgcctgcatcttcggttattacgtcaaggacccccgtgcctacggtgtagtggagtttgatgccaacggcaaagccgtctcgctggaagaaaagcctgccaatcctaaaagcaactatgccgtccccggactgtacttctacgactccaccgtgacagagaaagccgcctccttgaagccctctgctcgcggcgaatacgaaattaccgacctcaaccgtctctatctggacgagggcacgctgaaagtggagctcttcggccgtggctttgcctggctcgacaccggcaattgcgacagcctgctggaagccagcaattttgtcgccaccatccagaaccgtcaaggcttccgcgtgagctgtatcgaagagattgcctggcgcaagggctggatagatgtagaccagctgtatcgcttgggtgaacagcttggcaagaccgaatatggcaaatacctgatggaactggctgaatcgaagcgatgaactctttgttccccaaaaagagaaggagaatagttctcctataaaggcccgctgactttaatttttaatttataatttttaattctcatgaagacttatctcgtaaccggtgccgccggttttatcggcgccaactatattaaatatatcctggcaaaacataatgatattaaagtggtgatactggatgccttgacctacgcaggcaatctgggcaccattgccaatgacattgacgacgaacgttgcttttttgtaaaaggtgacatctgcgaccgcgtgcttgccgacgaattgtttgccaagtataaattcgattacgtagtgaattttgctgccgagagccacgtagaccgtagcatagagaatccccagcttttcctgatgaccaacatcctgggtacacaaaacctgctcgatgccgcccgccgtgcctgggtcacgggtaaggacgagtccggttatcccacttggcgcaaaggcgttcgttaccatcaagtgtctaccgacgaagtttacggctcacttggtgccgaaggctacttcacagagcaaaccccgctctgcccgcacagcccttacagcgccagcaagacgagtgccgatatggtagtgatggcctatcacgacacctataagatgcccgtcactatcacccgctgttccaacaactacggtccttatcacttccccgaaaagctgattccgcttatcatcaagaatattctcgaaggcaagaacctccccgtctatggcgacggcagcaacgtgcgtgactggctctacgtggaagaccactgcaaagctatcgacctggttgtccgcgagggtgtggaaggcgaagtctacaacgtaggcggtcacaacgaaaagaccaatcttgaaatcgtgaagctgactattgccaccgtccgccgcttgatggaggaagaaccccgttaccgtgcagtgctgaagaaacaagtaaaagccgccgacggcacgattgacatcagctggataaacgaagaccttatcaccttcgtcaaagaccgcctaggtcacgaccagcgttatgccatcgaccccacaaagattaccaatgccctgggctggtatccggagacgaagttcgaggtcggcatcgtcaagaccattgaatggtacctgaacaaccagccgtgggtggaagaagtgaccagcggtgattatcagaagtattacgaacagatgtatggaggtagaggttaaggtttagggattagggtctaaccgctaatccttaacctctaacctctcaattcagcgccaccgctaacagtaatcctaagaacagcatattgcgcgacgtctcgcccagtatgctgttcagctttttaccgctacctatctgtatcattttgcgccacgtcagtgcgtgcatatagagatagacgcagggagcccagataaattccagcggagtcagcttgcccgtgtagacaaaccagaagcagagcagcacggcggcgatgcccagtgccagatacatattctcaccgaacttcttgccgtagcgtaccaccagcgtacacttgccgctcacggcatcctgctcgcggtcgcgatagttgttcaccatcagcaaggtgtctatggcgaggccactgacgagcgacagcaccaccacatccatattcagcgtataggcctgcacgtagtaggtgccgcatacgggcacgaagccgaagaacaccagcaccagtacgtcgccccagccccgataggagagcagcgtggtatagaggaaagcaaacagtatgcacaccacgcccagcaccaccagttcccagcctccgtggggcagctgcccccagacggtgaacagcactgccagccctgccaggcacgacagtgtcagtgcgatgccgatgccggttttcatggctgccggcgtaatccaaccttcggcgcaggcgcgctgcggccccagccggtcttcccgacggtcggtccctttctggaagtcgaagaggtcgttgataaagttggcggcaatctgcatgccgcaggcaaagagggcgcacagcagggcgggtgcggtcttgaactgtccgtcgctgaaggcaagggcactgcccagcaataccgggatgatggctcccgtcaacgtcttggggcgggcggcgagaaaccatgcgtagggtgaattctgtttaatctcgttcatcgtagttccaatttagttcggcatctgccagcaaaaatactgaaaatccctatatttgtacccacttatgatgaagaagttagtctacatatccattctttctctgctgctcttgtcttcctgccgttccaagcggatgattaccgtgtcgttgccgcagccagtcatgcaggcagacagcacgcagcttggcgatactatcgggttgcctgcccgcctttcgccgatgttcacctttgaccagtctgatttgcgtaatgtccgccgccagccggcgaagggcgaggtaaagaaacagcagataaagaaaacggcaccggtacaaaaggtaattgtgcagcgaggtacaagaatcacatcgaaaaccacccacgtaggctcggcctataagggcgtcagccgcattaagacgtacgacttcacgcatcgcgacgtgcctgccgccttcgagggcttccgcatcgcctttgtctccgacctgcactacaaaagcctgctgaaggaggagggattgaaggacctggtccgcctgctcatagaccagaaggccgacgtgctgctgattggcggtgactttcacgaaggctgccagtacgtgccgcccgtcatggctgccctggcgcaagtgaagacgccgttgggcacctatgccgtgcttggcaacaatgactacgaggcttgctatgacgacatcgtgcgcgaaatgaggcattatggcatgcatctgctggagcataaggtggacaccctgcggcgtggcggtgagcggattcttgtggcgggcgtgcgcaatcctttcgacttgggcaagaacggcacatcgcccacactcggcctttcgcccgacgatttcgtaatcctgctgacgcatacgccggactatgccgaggacgtcccggtgacaaactccgatctcatcctggccggacacacgcatggcgggcaggtgacgctgttcgggctttatgcaccgatagtcccctcgcactacgggcagcggttcctctccgggctgaagtacaactcaaagaacatcccgatgattgtcaccaacggcatcggcacttcgcagaaggccatccgcatgtttgctcccgcagaggtggtgatgattgtgctgcaccggctgacggactga

SEQ ID NO: 553 - DNA, 8846 bp, unidentified
  source 1..8846: mol_type = unassigned DNA
tcattttctgctgccgcagatatcaagtagtggacactcgctacagcgttctccccttgccttgcagtattcacgtccgaacagtacaaggcggtgacagaaatcagaggatctctcagggggaagtatctttctcaaatcctcttccacctttgcaggctctttattttttgtaagcccaagtctgccgcatatccttatgcagtgggtatcagttaccaccgcaggcttatgaaaaacatctcccataacaagatttgccgtctttctgcctatgccagcaagggtagtgagcttttctatggtatcaggtatctcaccaccaaagttatccattatctgtctgcacattgctacgatagagcgagcttttgttttatacagaccgcatgggcgtattatctcctcgatatcagcaacatctgcgttagcaaaatcctcaatggtcttatattttgcaaaaagttctttcgtgacgatattcacccttgcgtctgtacactgtgcagaaagtctgcctgctatcataagctcgtggggctttttatagtcaagggagcatatgccctcggggtagacctgctccagcctttccactatcatttgtgcacgttctttctttgtcatcggtactgctcctttgtttataagtgctttattattttatattgtacacttttttgcaggattcgtcaaccaaaatttcatatcagggacgatattccagcgggtttgtgcgttatactggcataaaaatgcgttttgtcatttttgcaggctgaaacagctttggtcacagtgcaatgatttgtcgacatttcacggaaattttacacgaattatgaatttataatcgtgattttacttcacatttcaaaaaaaggctatgatttttatacaatttcaataaaattatgaaattttgcattttactacttgcaaattgcaaaatagtgtgttataataagtaggtgatgtgcggaatgagtaaaaaagccgtgcacaaattataatttataagatgggagttttaataatggctttgaacaatgcgtatcttgaaagcgtttatgagaaggttgagaagagaaatcccggcgaaaaggaattcctccaggcagtatatgaggtactggaaagcctcattcctgttgtagaaaagagacctgaccttgttgaggcaggtataatcgacagaatagttgagccagaaagacagatcattttccgtgttccttgggtagatgacaatggcaaggtacaggtaaacagaggtttcagagttcagttcaactctgctataggaccatacaagggcggcatcagacttcacccttcagtatgtgcatcagtaatcaagttcctcggcttcgagcagatcttcaagaacagccttacaggtcttcctatcggcggcggtaagggtggttcagacttcgatcctaagggcaagtctgacggagaggttatgagattctgccagagctttatgacagagctttgcaagcacatcggtgctgacacagacgttccagcaggcgatatcggtactggtgcaagagagatcggctatatgttcggtcagtacaagagaatcagaaacgagttcacaggcgttcttacaggtaagggcctttcatacggcggatcacttgcaagaacagaggctactggttatggtctttgctactacacatctgagatgatcaagtgcatgaagaatgaaacattcgcaggcaagacagttgttatctctggttctggtaacgttgctatctacgctacagagaaggctactgagctgggcggcaaggtagttgcactttctgactctaacggttatgtatacgatccaaacggcatcaaccttgatgttgttaagcagatcaaggaagttgagagaggcagaatcaaggagtatgtaaacagagtacagggtgctgagtaccacgagggttgcagcggcatttggactatcaagtgcgacatcgctctcccatgcgctacacagaacgagatcaacgaagagtcagctaaggctctcgtagctaacggtgtatttgctgttgctgagggtgctaatatgccttcaactccagaggctatcgctgtattccagaatgcaggcgttctctttggaccagcaaaggctgctaacgcaggcggtgttgctacatcagctcttgagatgtcacagaacagcgagagactttcttggacattcgaggaagttgacgctaagctcaagaacatcatgacaaacatcttccacaactcatacaatgcagctaaggagtacggtcttgaaggcaacctcgttgcaggtgctaacatcgcaggtttcctgaaggtcgctgacgctatgaagtggcagggtatcgcttactaatataagcgtataaacaaagctatatacgaagcggacagtcaactgactgtccgttttttttatatcatgccagacttatgggaatattcccgtaggtctatttcacctgattttcttttattatcctgccacgctcaaaagcacaagcattctcaagcgttgtgcggcttatggcggctagggcttcttcggtgaaaaagccctgatgagaggtgacgataacgttaggaaaagacagaagccttgcggtcacggagctttctaggatatcctcctgtcggttttcaaagacgttctctgtttcttcctcataaacatcaagacccactccgtggaattttctgcttctgataccttttataaggtcttcggtattcacaagcgcacctcgggaggtatttacgaaaacaacattctctttcataagggagatagtttcagtattgataagatgatagcttgattctgtcagagggcaatggagcgagataaggtcgctttctctcaggacttcgctaaggggataatatttcacaaaatcaaggtcggggttttgataaacgtcataagctataacacgcataccaaagccgtggcatatcctgcacattgccgcacctatcctgcctgtgcctattataccagcggtcttgccatggaaatcaagtcccataagaccattcaggctgaaattgttctctcttacctttatatagcccttgtgtattcttcttgtgactgcaagcgcaagcgccatggcgtgttctgccacggcttccggagaatacccaggcactctaagcactgttatgccgtatttatcggcggcttttatatcaacattattatagcctgcacatcgcataagaagaagctttacaccgtgttcatggagccgtctaagcactgaacctgttatcgttgagcttacaaaggcacacacgccctcacagccctcggcaagccttgctgtgtcttccgtcaagtcagcttcaaggtagatgctttctatatcgggatagttttttcgctgcttttcaaatgaatctatatcatactgctttgcgtcatagaatattattttcatgaaaactcctccaaattttaaagtatttcattttacgcttgtattttttgcagctgtttataaaaatatacggtttttgccttaataagataaaattatcaaaggttgacaattgtgcgtaaataggatataatataggtgtcggtatgtaaaaatatactttaaatatactttaaatgcctgttttctacagaaaggatatgatgccaatgtcacaattttcggaacttctcagagaatacataaagaaaaaagatattactataaaagcccttgccgaaaaatgtggtatcgacagaacatatcttcataagatactcaaaggggaaaggaaagtgccaagcgtagattttgtagaaaatataagcttgcagctcatgctttccacagaggataaaagcaggctcatggagctttataacatttctgagatgggggaagatgtctacaatcgccgtaagcaggtgtcaaagataatacacgatatggcaaacaccaacatggaagatcctgacgctctgactttcaagacagaagttgatattgactctgtgcctgagatatccatctacaccgacaaacgtgagcttagaaaaaacctgcaggtgcttatatgcagcgatgttcataatggttctgacattcaggtcatcgctcagccaacagagtttcttaccaatctgctgtccattgccgcagaaggcagcgagtctgccataaaccatctgttcttctttgacaacacctcatacgaaaaaaacaccgcaaaatacaatctggatatttttccgttcatatgtcaccttgcacaaaagcatgaaaaatatgaggctttttattattatgagggtgcgtcggcatatttcaactccacgaacatcatgccaaacataatgataacgaataattttctgatcagaacagacagcgattattgtgagggcgttatatacagatctaagcctatggtagaattttatatgcggcagtttgaaaagttcaagacaaaatgtgcaaagcttctcgaccacgccgtggatatcttggaatatgtttacttttggtacgatgacaacgcaaatttcatcggcgtggattttcagccatgcaccatgctttgtcttacagaggatatatacaacgcccatgcacttttgccagctgacgcaaagaaatttgtaaaagcaaagctcaccatgggcaagaaggctctttctgaacacaaatttgtaaatctgttcagtgaaaagggccttgcagagtttatgacgacgggagagatttttgagcttccgagaaattcatatacttttcccactcttgcagaacgcaagataatgctacagataatgatatcgctttgtgaaaacggcatggcagactacaggataataaagaacgactattttgcggtgtcgaaaaatctttgtatcaacatttctgacaacacaagtcttaacatcattgccagaaacaactgcttctctgatttttcttatttgaagataagcgaaacgagccttgttcaggctttctgggattattttcagcactttatagattctgacgctgtttgctcacatgaagaaactatcgagatactcaggtcttatttgtaaaaaatgggcgaccaaaagccgcccactgtaatgatattatttaagctgttcacgcattaaagtgagcagctttttttctcgccttgacacctgcacctgcgacataccaagttgttttgccgtttccatttgagttttattctgaaaatatctcaggtatataagctttctatcctccgcttcaagggaagctatgacctggcggagagagagcctgtcagcaatttctatgtcaggagcatcaacagggatatctatttgtccgtggcggtcgtcttcatctgagctttcagtaagactaacagggggcagggcgacgttcatggctagagtaacggcttcttcgctttctcctgacagctcacaaagctcgcttactgtaggttctctcccctgctgtatggaaaatcgctcacgttctcttacaaggcgcatggaaagctcttttatgcttcgtgacacttttatcgtgccaccgtcacggaaaagcctttttatctcccctaatatcactggcactgcataggtggagaatttcacaccacggtcgctgtcaaaggctttcgcagcttttacaagacctatacagcctgcaccgtagaggtcgtcatactctatgccacggttgcggaagcggtttgcgcacaggtgaacaagccccagattttcttctgcaagaggggtctcgactatgctgctcattttatactctttctttcaaggttttttcaaggataagggtagttccttctccaagcttgctacgcaccttcactttatccataaagctttccatgaccgcaaagccaaggcctgctctttcctcctcaggtgcagtggtgaaaagtggctgcatagcctgctcgatatcagcgataccgcagcccttatcccttatttttatgtagatgtgtctgttctcgaatatccttatttgcatgaatatctcccctagggtgtttcggtatccgtggacaatggcgtttgtgactccctctgacactgcggtcttgacatctgcaagctcgtcgatctgagggtcaagctgagtaaggaaaccgctgactgcaactctagcaaagcgctcattttcagaatagctgggaaaactgactttcatttcattaaggggttttcgtttcaattttatcactctcctttgttttgtcatcggggctttcattctgttcctgagctgctttcttctcttgtatatacggggtcatatccgtgactatctttgtgagtctgtgcatacctgcaagctgcaagacctttcggatataagcaggaggcgacgccactatcacctcgccacccatttctgacattatcctgtatctgcccataacaagtccgatgcctgagctatccataaaagtcacctgagaatagtcgaggataagggtaagagggttatggcttctaatggctttatctatctctcccctgaaatattttgctgtatggtggtcgatatcgccgcatatctctgccacaagagttctggctgacggatagttttttatctccacattcatgctttatcattcctttcatcttttcgttttatccgctgaaaatatattatcacttacagtgggatttttttgtcgcattatcgtatgggtgaaaaaagcaggaacacacttttttgtgtgtccctgcctaggaaaattattatgttctatgcttatgtattaaagtccgttaggattattcttaatgaagttccagctatctgctgtcatttcatcaagaccatattgagcttcccagccaaagaccttctttgcctttgctgtatcagcatagcaggttgcgaggtcgcctgcacgtcttggctttactacatatgggagcttctttccgcaggctttttcaaagctgtgaagaacgtcataaacgcttgagccttttcctgtgccgaggtttacggcttcaacacccttgttttccattacatacttaactgcgcaaaggtgacccttagcaaggtcaacaacgtggatataatctcttacacctgttccgtcaggagtatcgtaatcgtcgccaaacacaccgagcttttcaagctttcctactgctacctgacagatgtaaggaagcagattgtttggtataccgttagggtcttcgccgataagaccgctcttatgtgcgccgatagggttgaagtatctcagaagtgaaactgaccaatcgttgtcggaaacataaacatctctcagtatctgctctatcattacctttgtatagccgtaagggtttgttgctgatgtaggcatatcctccgtatatggagctttgtttacagggccgtaaactgttgcggaagatgagaaaactatcttcttacagccgtattttctcattgccttgataagcatgagagtgcctgtgatgttgttgtggtaatattcaacaggcttctgaacagattcgccaaccgctttaagacctgcaaaatgtataacagcgtctatcttgttttcttcaaatatcttttcgagcgctgcaaggtcaagaagatctgcctcataaaaagcaaagtccttgcctgttatcttctttattctgttaagagcctccggctttgagtttgaaaagttatcaactataactacttcatagcctgcttcaagaagctcaacgcaggtgtggcttccgataaatcctgctccgcctgtaacgagtatttttgccatattctttacctcccaaatatgtcaggttttttcttacacttacattataccatattttcacgtttttgcaataccatttttgtttcaaacacatggatttttgttgcaaagagaataaaaatatgctatcatatctataacagaccatctcacagaaaggaacacacagaatgaacacagaccgtcattcctttaaatcagatcagacggacgcactttcactgtcagtatacaacgtgggctatgaaaaatgtcaggggcttcacagttggggaagcggcgttcgtgaccattatcttatccaccacatcataagtggcaagggcgtatacaaaacaccgcagggagagtatcaccttagcgcaggggacacttttctcatttacccctacactgttataacatacactgccgacaagaacgacccatgggaatactactgggcaggcttcaacggctctgacgctgaatttatccttgatcgtgcaggcttcacaagagagtgtcccgttatctccgcagactttggaagcgagcttaaagacagtcttgaacgcatttatcgtcttagtggaaacagaagctcagaccttgtgaaaatgacaggtcagctttacatcacgctaggcattcttatggaacgctcgggaagtcaaagccgttcggggagcaccgcaaagggatatgtcacaaaggcgaaaaactacattgcacacaactacacccttgggataggggtcgagaatgccaccgatttcgttggcgtgagccgtgccacgctatatcgagctttcatggaatacgaggggatttctcctgcacagtatataactgatttccgtgtgaatgccgcctgccgtttgctggaagaaactgagcttcctgtgtcagctgtggcaaggtcggtagggtataatgacagcctttatttttcaaggatattccacaagacaaagggtgtgtcacctacggaatacagggctgacgctttgtgtacaaaaggtgaaaacaaggcgttttcggttgacaagggtatataa

SEQ ID NO: 554 - DNA, 14059 bp, unidentified
  source 1..14059: mol_type = unassigned DNA
atgaaagaagactggaaacccggaaccatgatttatccgctgcctgccgtattggtgagctgcggaagcactccggaggaatataacattctgactatcgcatggacggggacgatttgtacgaacccgcccatgtgctacatctccgtacgccccgaacgccactcctacgacatcatcaagcggaatatggaattcgtcatcaatctcaccacgaaagatatggcacgggccacggactggtgtggcgtacgctccggaaaggactacaacaaattcgaggaaatgcatctgacaccggggaaaagcaccgtagtcagcgcgcctcttatcgaggaatcaccgctttgcatagaatgccgggtaaaggagattatggctctcggttcgcacgacatgtttatagcggatgtggtaaatgtccgtgccgatacccgtaatctgaaccctgaaaccggcaaactggaactggcggaaacgaatcccttggtctatgtgcacggtggatattatgagctgggagaaaagataggcaaattcggatggtcagtagagaaaaagaagtaataatgcgataaaggttttaagagatggagttgcgacgaatcttgatgggcttatatctgttggccttccccgccatgatgtggggacagactccggttgtgcccggtactgccgacgaagagcattccggacaccgcaaggaaactccggtcaatttcggtttcaaaggcggtttcacctcttccttgttccttgtatcccagttcagcgtcaacggagtgcccattgacgaagtgcagaacaattacaaaataggatatttcggttcccttttcatgcggataaacttcgaccgccacttcctgcaaccggaaatatcctacaacatcaaccggtgcaacatcaccttcgagaaacctctgcccgaagacgccgcatcaggagcccggccggaggaagcctccattacatcgtccatccacagtatagacatccccgtcatctacggatacaacttcatcaaggaggggccgtacagccttgccgtctttggaggacccaaagtgcgctatatatgggacaggaaaagtgacatcgacttcgagaatttcgaccaggtgaatatccgtgaaaggctgcgtccgctcaatctcagtttcaccgtcggcgtatccgtcaccatctcacgcgtctttttcgacttccgttacgacatggggctgcacaacatctccaagagcgtgacatacgatattccggccgacaacaacgctgctgacgaaaacacgaaaaacgaaatccgttttcaccgcagggacaatgtgctgagtttttctttcggagtgttcttttgacagtaaatttcttccttttctttcaatttattcatttatttcccgtaaatttgtgcgcttaataagagaacacagatttatcaaacttatctaataagcagaatgaaaagagatgatttaattttcgaacttatcgaaaaagaacaccaacgtcagctcaaaggcattgaactgattgcatcagagaactttgtaagtgaccaggttatgcaggcaatgggctcctgcctcaccaacaagtatgctgaaggataccccggcaagcgttactatggtggttgtgaggtagtagaccagagtgagcagattgccatcgaccgcttgaaacagattttcggcgcagaatgggccaacgtacagccgcactccggtgcacaagccaatgcagccgtattcctcgccgtgctcaatccgggcgacaaattcatgggactgaaccttgcacacggcggtcacctctcccatggctcactggtcaacacttccggtattatctatactccctgcgaatacaatctgaaccaggaaaccggacgtgtggactatgaccagatggaagaagttgccctgcgcgagaaacccaaaatgattatcggcggcggttctgcttattcccgcgaatgggactataagcgcatgcgcgaaatcgcggacaagataggtgccatcctgatgattgacatggctcatcctgccgggctgattgcagccggtgaactggataaccccgtgaaatatgcccacatcgtgacctctactactcacaagactctgcgtggtcctcgtggtggcgttatcatgatgggtaaggacttccccaatccctggggcaagaaaactccgaagggagaaatcaagatgatgtcccagttgctggattcagccgtattccccggtatccaaggtggtccgctggaacatgtcatcgcagcaaaagccgttgccttcggcgaaatcctgcaaccggaatggaaagaatatgccaagcaggtgaagaaaaacgccgctgtcctggcacaagccttgatagaccgtggcttcaccatcgtttccggcggtacggacaaccactccatgctggtagacctgcgcagcaaatatcccgatttgaccggtaaggttgccgagaaggcgttggtatctgccgacatcaccgtaaacaagaacatggttccgtttgacagccgctcggctttccagacttccggtatccgtctgggtactcctgccatcacaacccgtggtgccaaggaagacctgatgctcgaaattgccgagatgattgaaaccgttctgtccaacgtagacaacgaacaagtcatcgcagaggtacgtgcacgcgtcaatgcgaagatgaaagaatacccgctgtttgcttattaataagcaaacagaattaaaaattaagaattaaaaattaaaggctgcgcaatgttcgctttgaactgcgcagcctttaatttttaattctaaacgcgctccgcgcgtttagctcagcccttctatatttccgtccacaatatcaatgtgttcggcttgtggtttcttgggtaatcccggcatacggagaatttcaccggcgatggctacaatcatttccgcaccgttattgaccacaatatccttgatgtggaactcaaagttgttgactgcaccgtatatcttcgggtcggcagagaaggagtactgcgtcttggcgatacagacggggtaatggctgatacccatctgctctatcagtttgataaccttgcgggagtggagactgtaagtcactacgcttgccccgtagaggttgcaggctaccttttctattttacgttccacgcaatcgctctcttcgtaggtgaaggtcagcggttcggatggtttgttctcgatagtatctactaccagattggcaaggtcaacggctccctctcctcctttggcaaaggcgttgttcacggcaaaacctacctcaagcttttcttcgcaatggcggcggatagcttccacctcctcgtccgtatcactggcaaaacggttgaatgccacgatgacctgctggccgaatgaacgcaaattgcgtacatgcttgtccagattgccgaagccctctttcagtccttccatattgggttccttgatgcggtccagactgacgccgccatgcatcttcaatccttgtgcggtagcaacgattatcgtcaacttgggctgtaggccgctcttgcggcacttgatgttgtaaaacttctccgcacccaggtcagccccgaaaccggcttccgtcactacataatcgccgaatgtcatggccatttttgtggcaagaatggagttgcaaccatgggcaatatttgcgaacggtcctccatgaacaaaagcagcagagccttcggtagtctgtaccaggttggggttgatagcatctttcaacagtacggtaatggcaccggctactcctaactccttcactgtgaaaggagtaccatcgaaacggaatcccagaataatattttcaatacggcgacggaggtcatcgaggtccgttgccagacagagaatagccataatttcggaagccggggtaatatcgaagcccgactcctcggtaatgccgttggtgctcggtcccaatccggtgacaatgctccgcaaggaacggtcattcacatcaagtacgcgccgccagatgatttctttcagtccgaagccgtccgcctgatgctggtacaagtaattgtcgagcaaagcggaaatcatgttgtgtgcggaggtaatggcgtgaaagtcgcccgtaaagtgcaggtttatcttctccatgggaagcacctgggcatatcctccgccggcagcaccgcctttcatgccgaagcaaggacctaacgagggttcgcgtaaagccacaatcgctttcttgccaatcttgttcagccccaatgccagcccgatggacacggttgttttaccgatacccgctttcgtagccgtgatagccgtcaccagtatcagattgctcttcttcactttctcttcatcaatcagatgcgtaggaatcttggctatgtaacggccatagttctctacttcgtcacgcgggatatccacactttcagccacctgctttatcttcttcagctctatgctgcgggctatttcaatgtccgatttcatacagagtcttttctttaaataacaactttaatgttttgaaagttgcaaaagtacgaaagatgtggcaaagtacaaaagaataccgtattttcacctgaccacctgcatcttctatctatttgaaccgcgacgtatccactgcctcccgttgcttctccttatatccaccgaatttataagtaaacgatacgccgaattcgcggaagcatgagtaatgattcgtcacattctgcgtcttgaaacggatgcggggagaaatctgtcccgtctcaaaaatatcgttgcagtagaggttgaggatggctttgttcttggcaaagccgtaacgcagggcaatattcacattgcccgacgtaggcaggtcgtagatgccctgaatggctttactatgcacaaatccggtcaccgtcagcttcaagtcgggcttggtggagagagtaaaagtattgttcatctgggcaatgccatagcattgctttctgtcgaaaggaatatcccagaaatcaccatccttttcgcggtgccacaagccgatgagggtaagacgagaattcaaccaattcttcaccttaaacggtatagaggcttgtatacctgcttgttgctgataatcaaaattgagtgtcttgtagatttcaaccagacgttcggaagattggtagagcgtctgtacggagtagtccttggtatggttgaaccaagcgctgaagatgtatttgctcttcaaaatataggtcattttaagctcatactcttgtgccggtttcagcaacggattaccatgcagctcagagtatccgccgccgatgtaagagacggcatcctgcaccgcccagtagtcgggatagtccttgtcgctgctcagagagagctgaaggatatgtcccggtgctggcatatagttcaagttgacgatgggataccagtcccactggttccagacgggagtcttgtaatgctccacagccagggaagcgtccaaagcgagtttgtcgccgaaactcttgctggaacctgcatagatattccaggtctgctcgcggcggcgggacttcatattgctcaaggcatccgatgaggtcagttgtccgccggtttcggggtcataataatattggtagctgttgtcgatgctggtagtatagatggctccgtaattcaaatcccaaccttttcccagactgtgctcctgggccagaaagaatttccagcggttgatgcgctgacagtcttccgtgtagaaatcgagttcctcatcctgcatacggctatgcagtagttggttggacggagagcggtagtaggtcagttcggcaccggctttgaggccgaaaggggtacgatagtccagacggccgttgtgcagccagtcggtgctattgctatgagttgtggacacctgcgtgcccgtcacgcccttccagttgtgggaggtggaatagccaccgttatagacgaaactcagctgatggttcttggcgatattatagtccgcccctaccctgaaattatgggtatggctgcggccacggcccacctcatctgttgtcatggggtgaaccgagccgtccgccagggtgtgcacagcctctttgtcggtagtagagtagccccggccatggctgtgcgagtaaagaaaatctgctgagaatttatttttgctgaagagcaggctggcgcgttcctcaaagccttcgttgtgcttctggcgatacttgacgtagagttcgccttgccaggagccggggccgcctgccgattgtttcaaggtgatattgataagtgcgccacgcacctggtagcgtgcaggggcgttgtacatcacttccgccttctctatgcggctggcagggatgctgcgcagcaaggcatagagctgccctgtgctgagggtggttactttgccgtccaggataacggtgactccctgacctgccaactgcagccctccattcatctcgatgacgccgggaagctctttcacggcatcgtaggcattgtctacggggaggttctggataaggcggggcaggtcgtacaccagcttgccttgcgctgccttaacgatggggcgttcaccggtaatcatcacttccggcaaggtctgataaagactgtccagacgggcatcggtcgtgataaggctgtcggcgctgaggatgcggttgtcgtccgcaccggaggtggttgcagtgccgttgttctcttgtgccgaaagactgatgctcaaagcacagcatacaatagggagtaaatagaatcgtttcatgttcttctttttatttatgtttatattcttcttctgcaaatcttcgtctgcaaagtacggcagaatcagcagaaacttgtgttatcagcggcttaccaagtgttatccagtgttatcgggagtgttatttagtcttatcggatgatagggttcacaatattaatcttacctttgtatgtataaaagtaaccggaaacaaacatgaaactgccattcaaatatattgccatacttgtcatcgtctccctggccggtatcttcgcctaccaagcctactggctgacggggctctaccataccatgcacagtgaaatggaaagggacatcaccgaagccatgcgcatgagcgactataacgaaatgatgatacgcgtggataaaatgaagcaggacgacataaaccacggtgaagtcagcgtatcagccggatacagcgatgacggaaaatcatttgtccgtagcagtaccaccatctcccgtgaagattctttggacaacaccaccctgcacgaaaccttcatgcccaaaggagacagtgtttacgtgacccacccgaacgattcaacccgcgtggaagtcagtgtcaaggactcggacagctctccccaatccgcattgagtgccaaagggggactggatgtgattttgcgcgaccaaaacagtatgctggaactcgccacctacttccagcgcggactgcattcgggactggacatcatttccgaccccgacgtagtgctttatgacagcctgctgacttcattcctgcatgaccgtaacatcaatcttccccataggctgctacatcttcacaaaggcagtaaatgggactctaccattctctatatagatacattggtaaacatcggtactcccggctatgtgcctacctcaaaagctgtggaatataattattctttcgacatcaatacaagtcaaagctaccgtctcatcatggaaccggtcggcatgctggttctgcggcagatgtcgggcattctcaccacgtcattcatcatcttgattgtactcgctttctccttctggttcttgatacgcaccatcttgaaacagaagacactggaagagatgaagagcgatttcaccaacaacatcacccacgaactgaagacccccatcgccgtagcctacgccgccaacgacgctctgctcaacttcaaccaagcggaggaaaaggcccagcgcgacaaatacctgcgtatctgccaggaacagcttcagcgcctcagtggactggttgaacagatactttccatgagtatggaacgccgcaggactttccgcctgcacccggaggagtttgcaatacgtgatattctggaaacgctcatcgaacaacacaagctgaaagcggaaagctccgtccacatatcggtggacatcgaaccggaagatttgagcgtacttgccgaccgtacgcatttcagcaacatcatcagcaacctgatagacaacgccatcaaatattcgcacggagaggccgaagtggccatccattgccgcaaggtaaccgtcgaagggcagaatgaacagactgaaatctccgtcagcgaccacggtatcggtattgctcccgagaagcagaagcacatcttcgacaaattctaccgcgtacccacgggtaatctgcacgatgtgaaaggctatgggctgggattgttctatgtgaagaccatgatagagaagcatggtggcagcgtatcggtaaagagtgagttgggaaaaggaagtacctttacgataaggatataataacattatttgttagggtactttacattacttgttaaggagctttacattacttgtaacaaaagcgacaattatggaaaagataaccgtacttctggttgaggacgaacagaccctcgccatgattatcaaggacacattggaagggcagaacttcatcatccacaccgcagcagacggtgaagagggattgcgcaagttcttcgacctccgtcccgacgtgctggtggcagacgtgatgatgccccgcatggacggctttgagatggtgcgccgcatccggcagaccgacaaacagaccccggtactgttccttaccgcccgctccgccatcaacgatgtagtggaagggtttgagctgggtgccaacgactacctgaaaaagcctttcggaatgcaggaactcattatccgcataaaggccctggtaggcaaagctttctcctttacagaagaaaatcccaaggaaactaccgtttttgaaatcggtgactaccgtttcaattccgtcactcaacgacttgcttttgcaggcagcaccccgacttcacctgacgcggatacggaagtggaactctcccaccgcgagtccgaaatactgaaacgcctttgcgagaaccgcaaccaggtggtcaacacccagaacgtattgctcgacctctggggagacgacagcttcttcaactcccgcagcctgcatgtgttcatcaccaaactgcggcataaactggccggagacgagcgcatccgtatcgtcaatgtgcggggaataggatataaactaatagtaaactaaactaaaactaaactactatttatgagaaagttattattcattacttttatctgttcctcactctgcgcctatgcacagagcgagattccggaagacacaataaagaaccggcctcccgtaaagaaagagcagattcccttttctccaaaagagaacaagcgtacgggccttgatgaaagccagccccaacaaagtctgcagggcaaacagcaggaagagataaatctccatctccctccctccgactatgtggagcccctgccctggacggacatgaagaagatacactttcagaaaaacatctttgaatgggacttccagcgtttcgccgatttcctgctctcgccggaagtcgtactgacgatgtacggcagccataacacctatcctgcaatgggctccatcatgcaggctggcgcaggagttacttattacagtcccgacggacattgggaattgagcggaggggtatatgccgcccattattccatctcccaaccttcatccattacaggtgcccagtatgccaaaagggatgccccccgaggtactcaatgggacataggctacaatgcctccgtatcctaccgcatcaatccctacatgcgcctgcatgccttcggccagtattcgggctacgggagaagcaactcctttcatggatatatgaacccgatgtatccgcaaagcggttatggcatggtactggaactgaaagtgacggactggctcgacctcaacggagggatggaacgaagatacgaccccactaaaatgaaatgggtaaattcgcccatcttcgcccctaccattcgtataaagaaatagaaataatacaaagatatttccggaaatagagggaaacgagtatctttgttcagtctgcccctatgcggcagacagcaactgaaattgtgaacaaagaacaatgaaacgaatcttcttctgcatcatcattttacttgcaggcatgtcatccgtcagcgcacagagcgagatgcctgccgatacggtacgtactgcagtacgtggcaaagcgtctcccgaaggcatgtctccgtctgaaaaggaacttctgccggacgtgaagaattacgacggcttcctgctggatatggggctgatgaatctgtccgcccccactcttcccaaattcactttggagataccggatgccagcaaagactatagccgcatcttccagttgaacccgaacgtgacttattcacaaggtctttcgaacatattctcactcagcaactcccggtatttcagttcgaatcccttcggactgacgggcttctggggctctaccgacaacctgcaaatgggaagtttcactttgaagaacggcatgcgcatccatacgtacggcgaatatgacaaggacggctggaaagtgcccaacccttccgcactgccttgggaaaagaacaatttcaaaggggcgttcgagctgaaatcagccaacggagcctttggcatacgcatcgaggtacagcagggcagacacgtgccctattgatgcccatcacttaacaacagaatcaatgacaagaaagaaaatactggtgataggcgccaacggttttaccggcagacgcatcctggatgatttgtcccgcaacttgtcttaccagacaacgggctgttccctgcacgacgacatttgtccccattcgggcaactatcgctttatccgcacggatatatgcaaccgccaggcggtggaaaagcttttccaggaagtacagccggatgttgtaatcaatacctccgccctctccgtccccgattattgcgaaacgcaccatgcagaagcggatgccgtcaacattactgccgtggagcatctggcagaatgctgtgaggcgggaggcagccgttttatccatctttccaccgacttcgttttcggtggtgatacggaccgaccctatacggaggaggatattcccgctcccgttaattattacggctacaccaaactggaaggtgagaaacgtattgctgccgtttgcagggattatgccatcgtgcgcgtagtggtggtgtacggtgccgccctgcccggacagcatggcaatgtgctccaactggtggcaaacagattaaggaacaatgaggaagtgttcgtcgtatccgaccaatggcgtacgcccaccttcgtgggagacgtgtcgcaaggagtggagaagctgataagtcatccgcaaaacggtatctatcatctctgtggcagcgagtgcctgaccattgcagacatcgcttatcgggtagcggacgtattggggctgaatcgctcgctcatccgtcccgtcactacgaaggagatgaacgaaaagacaccacgtccccgtttcagcgggctgagtatagaaaaggcaagccgggaactggggtatcagccgcgcacgctggaagaaggaataaagcagatgttcggatggtaaataatgcaggtgcggatggcagcagattcgactacagcaactccggctctgccagtcctttctctttgcgatacacacgtaccatctccagaatcacatctccatatttctccacccctttttttccgaaatacggaatgcgtacaagcatggccttatccgaaggaagcagattgctgatacctagaattgccttctgctgaatgacggtgtatacgggtagccctaatgcggaagcttctgcattgcgccatgctaccaagcggttgtaaagttccggatgcagcacatccgtgggtacttcaacagccgcagcatcgcgtttccgctcacgcggacgtttctctttatcagcctgcttactgcttccctgcccttctttggcagaagcacttctccctttgcctttacccttctgcgaagccgaatcatcaatggaaagcagtgctttctgcttcaagtatcctgccatatggaaaccattctccagcacataatccagcaaatcagtcttcatgtcaaacacttcctccagctcctccatggcatcccggagcttcttcttcaactctttattatcagaagttaccgtactcgccatcaccgcatccagcggttgcaactgctcttgaaaataagtggcggcagagtgtatgcgcccctgcaaagtcgggtcggctgcatagtcctgcgcagtatcaatcaggcgggtatactggatactgaacttctgggctactttcgtcactttgtcgtgaaaacgttccatttcctccttacaggctgcgagttgcttgggaaagagcttgtacaagtgttcgtctatcagccgcacataccgccgcaaagcctgctccatgggctggaaatcgaacaagcccgacagcagttccaggaaataggtctgctgcaaggaacggaagcgtttctcgtccggctcgtttctccgtgcctccatcgtgaaggtatctactgcatggtcactgataacggcctttgcagaaagcggggcactgagcaccactccctccaatgtcttgcagcggctcagagccacataggtctgcccatgcgcaaaggaggcactggcatcaatcacggcacgttcaaacgtcagtccctggcttttgtgaatggtaatcgcccacgccagcttcagcggatattgccggaatgttccttcaatatcttctgtaatctccttggtttcctcatcaagcacgtatttggcattcgtccactcttcctcctgaagtaagaaggtagcgtcgcttcccttactgcgcacttcaattccatctgccgacacggctgtcacctctccaatcatgccattgtagtaacggtgctcaccggaggtgtcgttcttcacaaacattacctgggcaccgcgtttcagttccagtacttcatccgtgggataggaatattcgggaaactttccgtcaatcttggcacgaaaggcatacgagcgtcccggaagttgttccagctcatggtcattaatccgttgggcctgataattgtgggtcaccaggcggatgtatccttcttctttatctggtacgaaattgggaatataccggcggttcaaggcttccagcacttgcccgtcacaacggttttcgcgaatgcggttcagtagttcaagaaaagtcccatcgttctgccgatagactttctttagttctatggtgcaatattccgtctgcttcaaggcctggctggagaagaaataaggcgtgtcatagtatttgcgcagcatctgccactcatcgtctttcactacgggagacagctgctgtaagtcgccaatcatcagcagttgcacgccgccaaagggtttgttccggtcgcggaaccgcctcaagacggcatccaccgaatcgagcaagtcggcacggaccatactgatttcatcgatgaccaataaatctatgctgcgtataatgttgattttctctttcccgtaacgaaaacggtaggttgccttgccatctgcgctgaatgagctttcgggcacataaggagcaaaaggtacttggaaaaaggagtggatggtgacaccgcctgcattgatagcggcaattcccgtcggtgcaagtacaatcatccgtttcggactctccaccctcagttttcgcaggaaagttgtcttaccggtacctgccttgccggtcaaaaaaagatgagtgcctgtgttttcaatgaattgccatgcaagcgctatttcgggattattctccat

SEQ ID NO: 555 - DNA, 8542 bp, unidentified
  source 1..8542: mol_type = unassigned DNA
ttattttatagcgtcgagtgcgtttgagatatctgcaatcaaatccaccttgtcctcaagacctaagcttattctgataagctctgccggcactcctgcttccttaagctgctcatcattcatctgacgatgcgtgcttgttgccggatttaagcagcaggttctcgcatctgccacatgtgtctcgattgcaccaagccttaatgccttcataaatgcagacgctgcctctctgccgccctttaagccaaatgatacgactccgcagcctccgtttggaagatacttctgtgctctctcatagtatttgtttgaaggaagccctgagtagtttacataggcaacctttggatgattttccaaaaattcagccactgcctgtccattttccacatgctttggcatacgcacatgaagtgactcaaggccaagattcagcataaatgcattctgtggtgactgcatagaaccaaaatcgcgcataagctgtgctgtacatttggtgatgaacgcaccttccttgccgaatttctctgcatatgtgatgccatgatagctgtcgtcaggtgtgcacagtcccggatatttatctgcatgtgccatccagtcgaatttgccgctgtctacgattgctccaccgagtgtggctccgtgtccgtccatgtactttgtggtagagtgtgtgacaatatctgcgccccactcaattggtctgcagtttacaggtgtcgggaaggtattgtccactataagcggtactccgtgctcgtgtgccacctttgcaaaaagctctatatcaagcaccgtaagcgcaggattggcaatagtctcaccaaacataagctttgtgttcggtctgaatgctgcattcagctcctcctctgtagcatcaggagatacgaatgtagctgtaatacccatctttgccatagttaccgcgatgaggttgaaggtgcctccatagatggatgatgatgccacgatatggtctccgcactcacatatgttgaacatggcatagaaattggctgcctgtcctgatgatgtgagcatggcagcagtgccaccctccatagctgcgatttttcttgctaccgtatcacaggttggattctgcagtctgctgtagaaatagccctctgcctcaaggtcaaaaagctttcccatgtcctcgcttgtgtcatatttgaatgtagttgactgaataatcggaatctgtctcggctctccgtttccggctgcatagcctgcctgtacacactttgtacctatactgtattctttcattgtatttctcctttaatatgttaatgtttcagttggatatagtatattacatttggcgcgttttgacaaattcttcaaatcgtggaagtgtgagagtaattttaccgtactcagaggtatctataaccccctttcttttgagccggtctctatataccgagaataatcctgaattcatatccagtttttctctgatttcttttaccttttcttcaccacttactgatatttccaacaatatttttttatcaagctctgacagctccgaccagattttactgtacacatactcatcaaggcactgatcatattccggtaaaatatcttctatcgtgtgatcatccctgttttcccagtaaagatatcccaatacctggaatgcaaaaggatatccctttgtaagagctgccattttgtctgcctctctttgatccagttcaaaaatatccatatagtgtttcctgactgctgtaaagctaagtggctcaagcattatcttaggcgccctgtacaaaaatgtaagtgccttgtcgttctgcagatcatatatattttcaaacagccccgtcataagcagaaaaataggataatcctgtctcagaaatatctgaaatgaactgacaaatacttttacaaattcacagttcataacctcatcaactgaaatgagtaaccgcttattatgtttctttatattttcaagcatcaattccagcacattttctatatccgtaaccggtgctgcattttctatggaaacgcccagtccaaacgctgaaaaatccagttttgcattgacaaatattttattcatctgaggcatactgtaaatcttagctgcaaggctctgaagcatatctctcgtagggttaagctcaactgtcagccattcctcatccttctttatctctgatactatattggtcatcataaccgttttgcccgatccccttaccccggttatcataaaaagctggtttgcaggattttctgacctaaatgtctctactatctgattggtctgtgagattcttgatatatattgcagtggttttttcccgaatgataatgtaaatggattttgcattttgttttccccttatataactttatataactttttgtttcgtatataagtttatatagccttatataactttgcatttattatataactttatataacttttgtcaccataaattcttaatctttaaaagcatctttataagatattttatctaccagtgcttcataactgctgtcatcagcttgtactatctctctgacattgtgctgctctaatgctgctgttgttttttcacctattgagtatgctgtttccacgtatgcattctccggcagcatatgaaaaaatctttccacatttgatgcgcttgtaaaaacagcttcacttaccatgtttccaatgctttcaggaataccctcatatgcctgctcatttacatatgcatcaattttttctaattcacatatttctttaagccctgcctcaagatcaggtgaagcctcctttgccgagaaaatgcagactttacacattttatcagatatattatcattgcttaaatccaatgtactatttttccctaaatcaaatgtatcctcatcacttttcccataggcatactgcatacataatttcattgcatctgcaagtccttttccggtctgttctgccggaataatatctgcatttatgtggtgctttgcaagctctttttctgtagcttttcccaccactgcaaaccttgcatttgctataagcctgatgtctgcacctgccagctccagattatagaaaaatgatcttacaccgtttttgcttgtaaaaactatccagtcagccgatcttaccttattggcaaaatcaagaattattatcgggtttattatgcctgtcttaaccggtgtgacatctgctccaagctgctgtaattttgctatcaattcgtttgttttgatatacggtactgtgatttttcttccaaacagcggtcttttttcaaagaaatcaagcctgtcattcagtgaaaccacatcccccacaacgattatagccggtgatgtcagctttgcttcctcaatcttttctccgatatccgcaagcgttcctatacatttgcgctgcgcagcaagtgtgccgttcgatatcactgctgccggagtatccgatcttcgtcctgctttcataagccctgctgcaatgctttttacatgcgcaagtcccatcaaaaatacacaggtgattgtctcatctgtaaggagggaatagtctatatctgcctcctcatcctttctgctgtgcgcagtgatgacctgaaagccttttgctatgcctctgtgtgtgataggtattcctgcagccgcaagcgctgcaaccgatgaactgacacccggtaccacttctacctccacatttctatctaccaggtagagagcttcctctccgcctcttccaaatacatacggatctccgccctttaaacggactacaagctcatgatattttgatttctcgtacaaaagctcgtttatggcatcctgcttcatgacatggttgtgattttccttgcccacataaataagctcacagcctgcctttgccattgaaagaaactctggtgatgacagcctgtcatacaccagacaatccgcctgttttatatatttttctccttttaaagtgagcaggcccgtatctcccggtcctgctccaactaatactacttttcctgtgttttctctcatgattttcctaattactttccaatttataccgaatatcgtgcaccgcacgctccacaatattgtttctgtctgatgtcatatcccatacctgctctgtccttgcaagctgttttccatcctctgaaccaaacatcgcaagaagctttagcctgttatttttgttgctgtcattaccgcggtctttttctcttacaatatcacagtatgcagccacaggcagatgacagtttccaccgatttgctttaaaaattctctctcaatgcctgcgcacagatttgttttctcatctgacaaagcatcaagctttgccatcagcttagcattgtcagcacgtagctcaagcgccagtgtgccctgtgccggagccggaatcatatcatcctctgaaaagtactgtgtgatctcagaatctcttccgatacgctttattcccgccgctgcaagtacgattccatccagcctgtattcgttatacttattctgtttttcgttagctatctcattgttatttacagtattatcggcaacctcttcatatataatttcaccatcatatagcttacgaagccttgtatcgatatttccgcgtatgccaaccaccttaaggtcaggacgcagctttaaaagctgatactttctgcgcttgcttccggttcctatcacggcaccatgaggaagctcatccagtgaagcggcatttttcagcaccaaaacatctcttggatcttcacgcttccatgcctttgcaaatgtaagccctgctgccggttcatcaggcatatccttcatggaatggactgccatatgaatctttcccaataaaagctcgtcctctatctcctttacgaagataccctttgagccaatcttatcgagtgcctttttctgctctaaatcgcctgttgtctttatgataacagccttaaaatcatcatccggatatgctctttttaacttatctatcacgtaatcagtctgaacaagagcaagctttgagcctctcgttcctattaaatacctcattttactctcctacggatcatgccattttccatttatcatttataaatgaacaacaacttaaaatctgtaataccatactttaaactatatttccggaatccttccattatcaatagctgcacacaagatttctttaaatacacgctttctctcggcttccgtgtcatattgcgctattactttttcgcggatctgtcccatgtattcgttcagctcaccaagaaacggagtaagaatctcctgctctttgcctttcagatactgggtcagcacagggctgtttcctccgctcgaaaatgccgcaacaagattcttttcctttatgtatgacggaaaaataaagctgcaatcagccttctgatcgaccgcatttaccatgatgtccttagctttgcaatactctgcaatctcatgatttaaagcattgtcatcagtggcagcgataaccatttccatgccgtcacagtctttttgattaaactttctttttataatcgtaattctgtcagctgcatctgactccacctgactgccttctttgtttgctgcatctaatccgaagctgcccttatttgctctatcatcagctataagagttctcaacgcttcgcatatatcctctgccacaaccgtgaccttcgcgccaaaatccagcattacgatcaccttgcggtatgccacatttccaccgccgacgatcagacactctctttccgtcatatccacaaacatcggaaaatacgccatttttatctccctgtaataccatatccatactttatttcatacattatttcatgccttattttatactttattatactctttatgctttattttccaccttattcttcacactgtaaccgtttaatattcctgcaaaaacaggacgaagcttagcagaaaacactgctgccgatacgcataatataaagtccggtgcaaccgttatcagacagtaatctactattacgatgccccagctgacaggtgttgccgcatagaaattcttcatgcagtaaaagtatattgctccaactgtataatatgccaccagtccgaccgttgccggaagaatgagtgtaaacgcattggtctttttaagcttttctgtgatagctccgattaaaaatgcggcaagcacaaagcctaagaggaacccaaagcccggtcttaaaatgtatgtaggaccaccgcctgccgcaaatacaggcactcccaccagtccgatgcacaaatatactatcacgctaagcgatgccagctttgccccgagcagaaatcccgccatcagcacaaagaaccactgtaatgtaaaatgcatggtgtacataggaagcggaatatcaatcttgataaatgctccaactgcaataagtgccgcaaaaagtgcacatgttgtaagttccttcgtttttaatttcattttcgaacgctctttcgttttattaaatatacatgctataataacatctttctctaaaaaagaaaagccatcttcgatgaagctgacttttctttgcagctttcgctgcgactcaaaacattaacatatgatttagaagtaatattcatcagaatatattcgtaaatcctctttcgcgacctgtccaccctcgatatgaaacgagttgattacaggattttctgccataagcgacattatcatgtagctcgcacttggatcgtatgcaagctttatatcctcatccgatggccttgaagggctagacgggtgtgaatgccagttgccaagcggcttaaggccgtttgctctcatgtcctttatggctgccagctgctcctttggatccattgtgaaatggtcctcggcatggtctgtattcgtcaggtaatatacctttgtgatgagacgaccgttttcgtcctcactgcctgctatcagaccgcacgcctcctccggcagatgctctttagcatattttgctatttcatccagaaacggatatttcattcttatgatactcatatcgttcctttccttactgtctttttattcctgtgtacgaggtgcatcaaatcggcccgctgtctcctcgcagacctcctgctcgtagtcgattggctcgagaatggtcggatggtcgccacagactgcacagttgtgtgtatcctttggaagcttaatcttgtggaactccatggtgagtgcatcatatgtaagcagatatcctgtaagcagctctccaacaccgattaaatacttgatagcctccatagcctgaagcgaaccgattactccgcccatagctccgataacgcctgcctgcttacatgtaggcactgcatcctttggtggcggattcttgaatacacatctgtaacaaggtccctctcccggcacatatgtcatgagctgacccttgaaacggatgattcctgcatgtgaaaacggctttttctcaagcacacatgcatcgttgattaagaactttgccgggaaattgtcagttccatcgatgatgaaatcataatccctgataagctctctgatgtttgacgcatctacaaacatacggtatgtattgacctgaacatccgggttcatggcgttcattgtctcttttgctgactttaccttggcttttcccacatcggctgttccgtggataatctgtctctgcaggttggataaatctacctcatccgcatccacaataccgattgtgccaactcccgctgctgcaagatacatggctgccggagctccgagtccgccggcaccgataataagcaccttgccctttaataatttcttctgacctttaacgcccacctcattaaggataatgtggcgtgaatagcgttcaatctgctcatcagtcattgccattagcatccacctcccatgaagtaaaggaactctacattgtcgccatccttaagcactgtctttggcttatcctctgtggcaacaaattcctcatttattgaaactgttacatactcaggcatatctacattctcaagctcgataagctccggtaatgtaagtccatccttatattctttcttctctcctgctactgtgatagtcattttatttcctcctgtgtcacagattgtggtatctgtatgtgttattatcctgtatcagactgctttatataataatctaaaaactataataatgcttcaacccacgctttcaaatcggcaggcttttgtgcgccgacctttctgtctaagacctctgcgtcttttacgaaaagcagtgtcggattcgcagtcacctcatactcatcagcgagctctccgtcaaagtttgtgttgaccttgtatacgtgaagcttatcctcataatcatcctcgatatctccgagaaccggtgccagcttcttgcaggccacacatgaatccgagtaaaaatcaacaattaccggaagcttgctttttaatactttttcatcgaaatcagcctttgaaattcttgctgccat

SEQ ID NO: 556 - DNA, 9795 bp, unidentified
  source 1..9795: mol_type = unassigned DNA
tcacagcaccgccacggcaaggaaccgcacaacgagcgcggcaagccatgccacaacgcactggttcacgaccataacggtggcccagcggccgcccatctcccgcttgaccgatgccacagcggcgatgcagggggtgtagagcaggcagaacaccagcaggggagccgctgccgccgggctgagcgccgcgcccagtgcggcagaggagccatacaggatggtaagggtagagacaacgctctcctttgccataaagccggtgatcagcgccgtggacacccgccagtcgccaaagcccagcggtgcgaacaacggagcgatgccgctggcgatccaggccaggatgctctcctgcgggtctgcggtcaggctgagctggaagtcaaagttctgcaggaaccagatgatgatggttgccaggaagatgaccgtaaaggcacgctcgaggaaatcccgggccttttcccagagcagctgggccacatttttcaggccgggcaggcggtagttgggcagctccataacaaagggcacggcctcgcccttgaacagcgttcccttgagcagaaaagccataccaatgcccacaaggatgcccaggaaatacaggcccaccatgaccagtgcggcgtactccgggaagaaggtcaccgcaaacaggctgtagatcgggagcttggccgagcagctcataaagggcgtgagcaggatggtcattttccggtcccgctccgagggcagcgtgcggcttgccatcacgccggggaccgtgcagccaaagccgatgagcatgggcacgatgctgcggcccgaaagtccgatgcgccgcagcagcttgtccatcacaaaggccacgcgggccatatagccggtatcctccagcagggaaaggaagaagaacagggtcacgatgatgggcaggaaactcagcacactgcccacaccggtaaagatgccgtcgatcaccagcgaatgcactgcatcgttgacgttccacgccgtcagggcattgtccacaaggatcgtcagattctcaatgcccagttccagcaggctttgcagccccgcgccgatcacgccgaaggtcagataaaacaccagcgccataatgcctacgaacgccggaatcgccgtgtactttccggtgaggaagcggtcgatccttgcgctgcgcagctgctccttgctctggtggggctttaccacggtctgattcaccagctggtggataaagtggaaccgcatgtctgcaatggcggcggcgcggtccaggccgcgctcctgctccatctgcaggatgatatgctcgatcatctctttttcgttctgatccagcttcagggcctcctcaatgcgggggtcgccctccaccagctttgtggcggcaaagcgcaccgggatccccgccgcccgggcgtggtcctcgatgaggtggatgatgccgtggatgcagcggtgaaccgcaccgccgtggtcatcctcgccgcagaagtccatccggcccggacgttcctgatactttgccacatggatggcgtgatccaccagctcatccacgccctcgttcttggcggcggaaatggggaccaccgggatgcccagcatcgcttccatctcgttgatgttgatggtgccgccgttgccgcgcacctcatccatcatattcagtgccagcaccatgggggtgtccagctccatcagctgcatcgttaagtacaggttgcgctcgatgttggtggcatccacgatattgatgatgcccgtgggcttttcgccgatgatgaactgccgggtcacgatctcctcgctggaatagggcgacatggagtagatgccgggcaggtcggtgacttcggtatcggggtgttcccggatggcaccgctcttgcggtccaccgtcacgcccggaaagttgcccacatgctggttggagccggtgagctggttgaacagggtcgttttgccgcagttctgatttccggccagcgcaaatgtcagcaccgttccatccggcagcgggtgttcgccctttttggtgtggtagcggccgccctctcccaggcccggatgctccaccatccggccggccttccgtgccggggctgctgcgggtgcttccgccggggtgatctcgatccgtgccgcatcgtccagccgcagggtcagctcatagccgtggatctgcagctccatggggtcccccatgggcgcaaatttcaccagcgtgaccttctcgccggggatcagccccatatccagaaaatgctggcggagttctcccgttccgcccactgtatcgatcacggcactttcgccgatcttcagttcctttaatgtcatggcagatgcctttccttcgacaaaatgttagtgtatatgaacagtcttaatatatgctaactcaaaagcattgtcaaggcgggaagcggcaaaaattctcgcctgtccccgctgttttttgtagaaatctttctcctgttccggcaggtttccgggcaaaagaaaacgcacccctgaattttcacgttcaaaggtgcgttttgagaacagttctgtttacttcacggtgtggtagccatcggggttgttcttctgccagttccagctgtcagcacacatctcctcgatgccgtactcagccacccagcccagctcgttcttggccttggtggggtcggcgtagcactcggcgatatcgccggggcggcggggatcaatgacgtaggggatctccttgccgcaggccttggagaaggcgtggatgacatccagcacgctgtaacccttgccggtgcccagattgcagatgaagaggccgcagccggtctccagcttgcggatggcgcacacatggccccgggccaaatccacaacgtggatgtagtcacgcacaccggtgccgtccggggtggggtagtcgttgccaaagacgtgcaccttttccagcttgcccacagccaccttggcgatgtagggcatcaggttgttggggatgccgttggggtcctcgccgatcaggccggacttgtgggcaccgatggggttgaagtaacggagcagggccacgttcagggtggggtcagccttgcagacatcggtcaggatgcgctcggtaaaggccttggtggtgccgtaggggttggtggtggcacccacggggaagtcctcggtgatgggcacgctggcggggtcgccgtagacagtggcggaagagctgaacacgaagttgcggcagttgtggcggcgcatcacgtccagaatgaccagcgtgcagttgaggttgttatagtagtactcgatgggcttggaaacgctctcgcccacagccttataggcggcaaactggatgacggcatcgatatcggggcactcggtgaagatcttctccacgtcctcgtgctttgtcatatcagcctgatagaaccggaagtccttgccggtgatctgcttgacccgatccagcaccacaggggaagcgttgtaatagttatctgccaccacgatgtcaaagccagcgttcagcagttcgatacaggtgtggctgccgatataaccggcaccgccggaaaccaaaattgccataaaagtacctctcttctcgtcaccaaaattgcttgcgcggggcaggcccgccttctgccacaaggatacaacgttttggccgcagaatcaagtaacgggaattttataaggatggatttttgtttccatttatttttccgcgcattgatttacaagcattttttgttttttgcacatggagtgatggaacgctttgtgcaaatcagagaaaaagccctctcaggcaaagccgtcaggctttgaatgagagggctgcattttacagtttcccgcactgtttgccggtgaagaaccgcagggtggtgttggcgcggaacactttcccggcccgcagggcggtggaggggaactccgggtgggaggggctgcaggggaagtgctgggtctccagcgcaaagccgccgtatttctgcatcggcacgccgcccttgccgggggcagggcagtcctgcaggaaattgccggtgtagagctgcacgccgggctgggtggtatagaccttcatgctgatgccggtcttatcgctggaagcccaggcgcacaggctctggctggccccgcggcccctgtcgatgacaaagcagtggtcatagccgccgcccaccatggtggtctgggaaaagccggtgtcaatgtcccggccaatgggcttgcccgcccggaaatccatcggcgtgcctgccacgggcaggatattgccggtggggcaggtctcgttgttgccctccagatagcgggacgcatagatgcgcagcttctggcccagcacatcgccgccgccatccagattgaagtaggtgtggttggtcaggttgatgatggtgtcggcatcagaggagacacggtagtccatccgcagggcgttgtcctcagtgaggatataccgcaccgagatcttcagatttcccgggaaaccatcctctccatcggggctttcggcctccagaagcagggtatcgccaaaggtctttacctcatacagcttgcgcgggaaggtgccgtgcaggtggtttttgccgttgttggcttccagctgataggtcttgccgcccacgttgaacacggcgttctcgatgcggttggcgtaccggcccacgaacgcgccgcagcaggtactgccggacgattcaaagtccttgacgtaatcggcgtaggtgtcgtggcccagcaccacatccaccggcccgctcttggtgggcacccagatattcttgatgatacagccgtagttcagcacactgaccgccagcccgccggggttcgagatgatgtattcattgatcttttcgccgtttggggtcatgccaaagggcttggagagaaactgtgccatagggcttgcctccttttgtattttttggggacagcacactctctgttttatcctttattgttttgattatatcacagttttccccttctgtgttggcattttttaagggaatctatccaatatttcgagagattttttgtaaattctgccccataggcagaaaaaagccccggagggccaggggtaggcgctccggggcttgtatgtcagattagatattactgctggagatcaactgtaacctcataggtcattgcaattgcagcgtaagtctttccatttacagtcttagctgcaacaccaattttcgtaattttgatagacatgccatttgcgcttgccattttgtccagcaaatcgtgcatagtatccgcaccctgattcagacttccaatgttatccgcagtaatttccattacttcataggtgccattattctgcattttgccatccttcatcagaggcaatgccatcgtcatagaacccttaccagtcgaatacacatcttcctggaactttttggagtcctcatcggagtaggatttcttaaaatcaaaagtgcccttctcggtgtcgatcagatcgatcttgctctcagcgagtttcttcagatctgcatcatttacctgaataccagtagatgcctttacagaagcaaaagttgcatcttcagccttctgtgcgaaagaaggtgcgctgtcatcgccgcaagcggtgagcagtgccagagccataacgccgaccagcagaagggcggccattttcttgagcattttcatttgtagaacctccaatgtaaaatgatattttaccacacagaaagcatacccctacaccttctgcattgtgaactcattctacatctccccccttcccctgtcaatattttttattgaattccccaatttttggagactgtgccaaagctgcggcgatttttttagcagattgacaaaaagcacccctcacatggctgtgaagggtgctttggggaagttttcttactccggctgagcgctgttctgggcgatatactcggcggcatcatcggggatgtcgtcaaggttctcatcgccgatatccacgttcagcggcggcttcttgaagaggatgtcatacatcaggggcacaacgtacagggtcatcagggtggcgtaagtcaggccgaagatgatgacgatggccatgccgctcatcagctggctggccatatcgccgctgaacaccagctggagcatggccagaacggtggtcagggtggtcatcaggatggggcgcattcgtgttttgccggtggcgatcagggccgcgcggcgctccatgccgccgatgcgcagctggttggcgtaatccacgaacacgataccgttgttgacgaccgtgcccatcaggacgatgaagcccatcatggagatcatggtcaactgctggccggtgagcagcaggcccagcaggccgccggtaaaggccagcggaatggtgaacagaacgatgaagggggagagcaggctctggaactgggccaccataacaaggtagacgaagggcagcgccaggaacatccactggcccatctgatccaccaccatgccgttgatctcagagccgccgcccatatagaagctgcagccctcgggcatctcatcggatgcggcaaactcgttcagcttcttttccagcgcgcgggtctcggtggtggtattggtgccctccactgcgtccgccgtcacactgatatagcgggtctggttcttgctggtgatggagtccggggtggagccggtgacccaggtggccatatcgcccagcgtgcaggtgccggtctcggtggtgccgtcggcggccatgacggaggtcgtaaaggtcatatccatcatgttttccttggtcatggggtccagattgttgctgatctggacgttcatggtggagccatcgatggcaacgggggtctgggccgtggtggtggtggtcagcttggcggcgatctgctggtagacctgcgccacggtcaggccgtaggagcggaccttatcccggtcgatctgcaggttgatggtggcatcgccgctgcccagaccgttggtggcattggtgaagccgtccatctcgttgaccatatccaccaccttctcggagagggcggtcatggtgtcgatgtcgttgccggagatctggacggtcaggcccatatccagctggctggtcagctcctgcattccgctgatctcaacggtggcagtgcagttctccacgccgttcacagcttcctccagcgcctcgcgggcctgttcgatctgccgggaggagaggctctcgtccagcatcacgttgatctggtaggtgccgtagctgttggcggcgttcagcaggtcggtgatggtctggggcaggcccagctggccgacatccattccggccacgcggctgtcggtggtaacgcccacctcttccacgttgtccacagccagcagggcatcaatgacattctcagccacggcataggattcttccttggtcatatccttctcggtggagagggtgacgatggcctcgttgctggtgatggtgggcagcatctcaacgcccatggacatcacgcgccagccgcagaacaccagcagcaccactgccgcgcccagcggtgcccagcggtgctggaagcaccattccaggctcttgacgtacttttcctgcaccttgtcgaaccacttgagctctttgggcttggagtttttcagcagggtagaggaggccgccggggcaaccgtcagggccacgatgagggaagcagccaggcagtagccgatgcacatggacatgggctgcagcaggctcttgatgacaccggaagtgaagatgacgggcaggaacacgcagacagaggtgagggtggaagccatgatggccatgcccacctgcttggtgccctggaccgccgcgcgggctgcgggcacgccgcggctgcgcagacggtagatgttctcgatgacgacgatggagttatccaccagcataccaatgccgagggacaggcccgccagcgtcataatgttcatatccagaccggtgaagtacatgagcaccacggcaaacagcaccgacagcgggatactgatgccgaccaccagcgtgggcttgatatccttgaggaagatggccagcacgatgatggcaagggccgcgccgatgagcatactgctcaggatgctgctgacgataatgctgatgtagttgccctggttggacagcacgaccacatgcaggccatcgtatttctgttccagctccttgaaggcggccttgcagttgccggaaacttcaccggcgctggaagaattgctcttgaagattttcagcaccacggagcgctcgccgttcaggcgggtaaagctgtcctccgcgttgtcaatgatctgcacatcggccacgtcagacaggcggacatcgccaaagccgtccacatggagcagcagggcaccggagatatcctcgatgctgtcgtactcctcgccgaccttcagcagccaggacttgttgctggaatccttgacataaccggcgggcatggagaagttctgggcatagatcagctgtgccagtgtgttgatatccagcatcttggccacgtcggagttctccatggccttctgcttggcatcctcatactgctgcttggcatctgccagctgctgctcgtaattgttcagcatctcacgggcctcggtgaacttgatataggcctgcagctgctgctgggaataggtgcccacgatctgggtaaactggtccatcaggccgggcacgtcgtccatggccttgatggtgctctccagcgtgttataaatgttgctcaggctctgctgcacctgcagatcatcgaccagctccccggccgttgtgccggcggtgtcgccctgcgcgttcaggcgctgctgcagatcctgcaaagcggtggtcagcttatcggtgatatcgcgcagctccgccacgatctcgatcagagaatcgatatcctgcattccggtctcgttgaacttgtccacgacccgctgcaggccgtcccgcacatcgatcagggcctgctggatctcaggctcgttgaccacggcaatgagctggttgacgctctccagaagggcctgtgcctgcttcttgaccagcatgaaggattcctgcagctcaccggagtactggctgttgatggtatcgctgaccagcttgtcgtaattggccagctgggtctcgtactcctttctgcctgcctcgatctgggcctcggcagcgtccagctgggcctttgcatcggccagctgcacgtcaatgacctccagcagcttttcgttgatggcatcgatcttttcctgatcgagctgcacctgcaccatccgggtaaccagaccattggcggaaatattggaaacgccgccctgacgctcgatataggggaccatggtgtcgttgacgaaatcggccagctcataggaatcgctgccctcgcggctgacggccacggtcataaaggcgttcatgttcagggtatattcaatgatggagggggtcatgcaggtgcttggcaggctggaggtggtctgatccaccttgttggacaccttgaccacggcactgttcatgtccgtatcatcctcaaactccatcagcagcagactgtagttttctgccgaggtggcggtgacgtttttcacgcccgagatggtgcccagcgcactctccatcacgtcggagacctcgttctccacacgctccgggctggcaccgggatagaccgtgaccaccatcaggtacggtgtgttcacgtttggcagcaggttggtctgcatattctgcacggacacaaggcccagcataatgaccat

SEQ ID NO: 557 - DNA, 11753 bp, unidentified
  source 1..11753: mol_type = unassigned DNA
gatgcgctccacccggtcgtagcgggtcagctcccgcaccacgccgccgtcgcccgcgccgatgacaaggatatcctttgcctcccggtgcacggccatgggcacgtggacgatcatctcgtcgtagatgaactcgtcccgctcggtcagcatcacattgccgtccagtgtgagcacccggccaaactcgggcgtttcaaaaatatcaatgcgctgataatcgctctgcttggagtagagctgcttgttcacccggatgctgtgcttcacatcgggggtgtgaaattccgaaaaccaaaactccatctgttttccctccttatgccagaacgttcaggtgcaaaatatcagggtcctcagggccggtcatgctgcagcccttggccttggcgtactcgatatagttcagaatctccttggtgatgcgctcgccgggggccagaatggggatgcccggcgggtagcacatgacgaactcgctgcagaccatgccctcggtctcccgcaggggcaggctctttttgggggcatagaaggcctcctgcgggctggcggccaccacggggtcgatgtattcctggctcagcaggccggtgccgtcggtgtggtagcggcgcttgatctcggccagagcgctgaccagccgctcgatctcctgggggcggtcgccgatggagaggtaggccaggatgttgccgatatcgccgaactcgatctggatgtcgtactcgtcccgcaggatgtcgtagacctcgatgccggcaaggccgatgtccagcgtgtggacgctgagcttggtggtgtcaaagtcaaagacggagttgccgttgcacagctccttgccaaaggcgtagtagccgcccacggcgttgatctcctcccgggcatactcggccatgtcggccacttggtggaatacctgccgcccgcgctgcgcaaggttgcggcgggagatatccagactggacatgagcaggtagctgccggaggtggtctgggtcaggttgatgatctgccgcacatagccctgatgcacattgggcccgatgagcagcaggctgctctgggtcaggctgccgccgctcttgtgcatggagaccgaggccatatcggcccccgcagccatggcggaaacgggcaggccgttgccaaagtagaagtgggtgccgtgggcctcgtcggccaggcagagcattccggcctcgtgggccatcttcacgatggcgcgcaggtcggaacagatgccgtagtaggtggggttgttcaccagaacggccacggcgttggggtgctccttgatggccttggccacctgctcccgcttcatgcccagcgagatgcccagccgcttgtccacctcgggatttacatagaccgggaccgcgccgcagagcaccagcgcgttcagcacactgcggtgcacgttgcggggcaggatgatctcatcgccccgcttgcaggccgtcagcaccatgctctgcacagagctggtggtgccgcccaccattaaaaaggcatgggctgcgccaaaggcatcggcggccagctcctcggcctcccggatgaccgataccgggtggcagagattatccagcggcttcatgctgttcacgtccacacccacgcactgctggcccagaaaggccgtcagttccgggttgccgcggccccgcttgtggccgggtacatcaaaaggtaccacacgcatctgccggaactgctccagcgcctcataaatgggcgcgcggcgctgatccagccggaaccgtgtacggttctcactcatctcttctcctccgtccctggttccggcgcagcaaaaaagcgcaggcccaccacactggtgcagacctgcgcttgaagaagcgttctgaacatgcagacaaagcccccggtgacactggggaaaacctccgcatggttcaaaaagacgggatgacgagagtctatatagcaattacacttttactactcttattgaccgtttcacaagtctgcgcacgctctgcgcaatttcatggctgtaaaggaaccaacttataaaatttgagctttcaactcaatcaataatggcagcttgcgccgccggtcggcagtggacccggctgtccgtatggccttagccccgatgggcggtcccaggtaatttgctttgaaaagactctgacacgctttgtctctcaaaatcgatgatatcttatcatgctatgagggtggtgtcaatactttttgggaaaataaagcggaaaatgggcaagcggttcgcattatgacaaggacactgtaaagacatggtaaaagtgtggcaaaacactttgcacagacacggcaaaacgcttttgcttgacaaatgaaagaaattctactatactgattcttaccggtgcgccatcgccaagcggtaaggcaggggactttgactcccccatcgtaggttcgactcctgctggcgcaactgaaagagaacccgcagggggcctgggcgacaggttccgtgcgggttttatttttttgtgaaaagagggtgtttgtgtgaacgaagagaattctctgctgaccggggcagtgcggcccgcgctgctgcggtacgcgctgcccattatcctgagcatggtggcaacacagttttacgccgtggccgataccatgatcatcggcctgcggctggatgccgatgcgctggcggcagtgtccaacgcttccacagtgctgatgatctttctgttcatctccggcggcatggagctgggcggcggcctgctggtggcggcgggcaagcccactgccataaagcatgagatgaccgagctgctgtacaacctgctgttcgtggatgaggtcatcgccctgttgaccacgacagtgggctttgtgaccctgccggccctgctgcggctgatcaacacgcctgcggagatcctggataccgctgtgctctacgggcgcatctatctgctggggctgccatttttgatgccctacgatctgagcaaagagtgtgtcatgggctgcggcgattccaaaacgccgctcaaggtcattgtggcgaccagcgtgatgaacattgtgctggaccttgttctggtggggcccttcggggtggccggtgcggcggctgccacagcggcggcgcaggtggcgggcgcggtctacatggtggcgtttctgcgccgcacccagatggacgcggccttctcgccccggatgctcaaggcgcgctatgccagggatatcttccggctgtcggcccccaacagtgtccagcaggccagcggcaccatcatcaccacggtcaaacaggggctgctgggcggcctgggtgtggaagccattgcaggcttctcctgcgcaggcaagctgtccagtctgctgatgatgccggtgttcggctttgtgcagtccacagtgttctttattgcgcaaaacacagccgcccttcagccgggccgtgtgaaagagggcctgcgggaagggcggcggatcttgttggtgtattcgcttggggtggtggcggtctgcatcggtctgcgggggccgctgctccggctctttaccaccgacccagcagcagccagctatggatgcaccatgctggcctttgaatcggtgacctgtctgtttgtggcacagaagcatctgttcgaggcccgtctgcgcggtgcccagaagatggggctgtatctggcctccaacctggggcagattgccctgaacctgctggcctgtgtgatccttgtaccccgcattggttttgcaggcttctggatgtccagctggatcagcgcgcccatcggaatgctgttggcagcggcgctggcgaacctctcaggtgcttcgcaccagctcccctaatagggggggcttgcctctcctattaggagaggtggcatcccgccgggatgacggagaggttcagccgatcacctcatactgaaaatactcgcacttgaccttgctgcccacctcgatctcgggcggcagcagggccagcgcaacgggattcagctcgtcgctttcaatgtcggtgcggcgcaggttgacataatcgccgtcaaagctgacgacctcgtaataccaggggcccataggataccttctttcagttgagcttttctttgagctgtcgcttcttggagtggcggcttttttaatgcttccgtcttttcttttcgtcccaggcaaagtgcccggcgtagagcaggaacacgggcagggcggcaagggtgacagtccggctcaggcggatgccgtccggctgatagacaaagtcgatggtgaccgttccggcggggcagaggacggccatcaggccctcgtccacccgcaggatctcggtctcctgcccgtccacataggccgtgaagccgtcatcgtagggcacggagaagaacatcagattggccctgtccagcgtggcctcggcgtggaagcctgcgctggtcatctcaaaggcggtgcaggcagaggcccggcggtcggcgcaatcctgggtgtagcgggtgtaggtcagatcgttgagctctgccgtgggcaggggcgtgaggtactgcccgtaggccaccgcatcctcctcagtgagcaccagtgcccgcatgagcaggttggagcgggtgggggtcacggtgtcctcgtactgggtctcggtgaggtagtaatcgtaggtgaagcccatgggaacgtagttctggttctcgtagagaacatagccgtccagggtatcgtaatacgcccagccctcatcggcctcagcgtggaactgcttctgatgcgcaagtgtggtcagcaggtatctgacgctgagcaggccgcgcagggcgtagttggagagctcgggctgactgcgcacatcccgcttgacccccagtgccgggtagaagctgaggatgctgggagcggcggtgctgccgaaatactgcaggcagctcttgtccagccacaggcccagattgtcgtgggtcttgtaggtgtcaatgcgccagtcgccctcgggcagatcctccttcagggccagcgcgttgatgtactgctccacaaggtcactgtcggtgttccactggccgaacttgccaatgccgatgtggacgatgccgaacaggcagctgaacgccagcacaccggccagcaggcggcgggcaaagaccctgcgctgctgccagcgcctgcagatgcaatggtagacggccagcccgcccagaccaaaggcaagcacggcgcagtactggcccggattctgcagcacgcccaggctccactccttggtggtggcatcctgcacgggcaccagtgcaaaggccagcgtggcgatcatcacaaaggcaatgctccgggcagggcgggcgaggtcgaggctggggtcctcccacgcgctcaccgtcatggccgcaaggatgagcaccggcatatagaaccaccgggcatagtagctggaattgagggcatagaacgcgctgttcaggatgggcaccagcgcaaataccatgcagacggcaatgatccgctttttgctgtcgccctgccgggcacgccagtaggccaccacaccggccagactgcacaggggcagataggctgtcatgctggtccatttgatgatgccctcagaccagatggaggtcatatagggggaatccgggggcagcacccagctcagcagaatggccagatactgctggggcttggaataggtcagaaagccccagccggaggaaagatcgatggtgcgcgggttctgcagtacgctgaggacagtgggccagagcaccacaaagcccagtgccacgcccagcaggctctcaaaggccagctgaccgaagaggcggggcgtgagccgaaactccccggcggagagcttgcagacgaagtagatgacaaggaagagcacctgccccacaaagaaaaagtagttgttgagcaggttcaccgccacccagaaggcgaaccatccgtggcggcgctcgtagatggtctcatccagtgcccagagcatccaggggaagagggccagcacatcaatgaagtggttgaagaagatgttgtacagcccccagcccgaaaaggcgtagagggccgcacccagcaccgcaaagttcgggtctttgacgtagcggcgcaggtacagatacgcgccgccgcccgccaccgcgaacttgagtaccagcagcggcaccatgaggtaggggagccagttctgcgggaagagcagggaaaaccagaagaagggggagccgtacaggtagaacgaataggcgttcatggttccgctgcccaggtcagttgcccaggaaaaggtattcttcacgcctccgtatccggcggggtagcctgcccccttgagaaagccgttcatgtagcggtaaaagctgatctgctggctgttgaaatcgcctgcatagtggaaaaagccgccgtccagcagatagaacggcaggaagatgagggcggctgtcagggcgcagagccccacggtgagccagaacttgtcctgcttctgtcccagcatccggggcgaagaatgaaatgcagtcatgcgtcagtcctcttttcagtatcggaaatttcccgcttacgggaacggcacctcgcgggtgtcatcggggtcctgcgcggccctgcgctgctgctcgaacaccgcgtcgatgagggtgtcgaggtcagaaaggcggctcagctcacagcagtagcgccgcaggctggcggcccccttcaggcccttcatgtagtgcatggtctgggcccgggcctgaggcatggcaacgaactcgcccttctgctccaccatctcctccacctgccggcgcagggcgttcatccgggcctgcaggttcggctccttgggggcgggcaggccctccagcgcggcgttcacccgctcaaagagccaggggtcgcccagggcggcccgggcgatcatcacgccgtcgcagccggtttcctccaccatccgcacagcatcctcggcggtgcggatatcgccattgcccagcacgggaacgtggacagcatccttcaccgccgcaatgatggacgggtcgatgcccggggtgtacatctgctcccgggtgcgggcgtggacggcgatgagcaccgcgcccgcctgctcacaggctttggcgcattccacggccgtgacgtgctccgcgtcccagcccttgcgcatcttcacggtgacagggcgggaggtgtttttgaccacttcctccacaatacggccgcagcggtcgggatcaagcatcagcttgctgcccgccccgcccgaaacgatcttgggggccgggcagcccatgttgatgtccagaaaatcgaacgcgtactgttccacggcggcagcggcctgccccatgatctcgggcacttcgccaaagatctgcacgccgtagggggcaccgttgggttcggccttgagcaggctgacggttttgtggtcgccgtataccagtgcccggctggacaccatctcactgacggtaaaaccggctccgtgctgggccatcagccgccgggccggggcatcggtaaagcccgccatggggccgaacactgcccggtggggcagggagatctccctgatcttcaaaggggtgttgaaaggttccatgatactccttagcgctatctgatttagttgataacatgataaaatttggattataagtataccatatttccggcggcagaacaagaagcggaacatctttcttgtcagcgcgggatttttccggtatactggggacaaaaggaggagcggctggaacacggcagccagctgcacaaaagagatggaatacagaacatggaaaaagcagaacggcgcaggggagagcatccgcacctccctgctgggctatggctgtatgcggtttcccaccacaccggagggagccattgacgagccccgggccgaagcgctgctgaatgccgcgcgggatgcgggcgtgaactattttgacaccgcttacccctaccacggcggccagagcgagccctttgtgggcagggtcattgcaaagtggccccgggagagcttttatctggccaccaagatgccgctgtggcagtgcgggagcctggaggaggcccagcatatctttgaagagcagctccggcggctgggcgtggagtacatcgacttctacctgctgcactccctgcacgccgcccggtacgaccgggccaaggaaatgggcatcgtggactggctgtgggagcagaaaaagctgggccgcatccgcagcttcggcttctcctgccacgacaacgcggcgggccttgagcacatcctgcgggatcagccctgggatttctgccagctgcagtataactatctggacaccgatgaccgtgccgaggagatctcgggtgaccgcggctatcagttgaccgaggagctgaacatccccctcatcattatggagcccatcaagggcggcacactggccaacctgcccccggaggccgaagcgcccctcaaggccctgcggcccgtggcctcggatgcctcctgggccctgcgctgggtgggcagccaccggaacgtccatgtcatcctctcgggcatgagcgccgaggatcagctcacggataacctggccacctttgcccgctttgagccgctgaccgctgcagagaccgccgcggtggagcagaccgccgccttcctgcacagccgcatcaagatcggctgcaccggctgccggtactgtatgccctgccccatgggggtggacatcccggacaacttcagcatctggaacaagctggggatgttcggccagcccgaggccatcaagcaccagtgggaagctcacttccccgatgccgaaaaggccagccactgcgtccgctgcggcaagtgcgaggcggcttgcccccagcatctgcccatccgcaatgcgctggcccagctgcagcaggagctggatcggctgtaatctgcatcagaaaagccaccggcaaaaaccggtggctcttttctcttattcgctccactccatcccgatcttatccagcattgcgcggcgctcaggggtgagcttggggtcgtgggtggtatcccactcccgcatccggcggagccagtcgcccaggcagaagccggtttcgtcggatttgtagttggcggcggcgtggaggttgccgtgtgccttgtagtaggcctttgcctgctgataggcggttccccacttggcatcccgggcatcccacaccatgccgatgctgttcagctttttgatgtgggcggacgtgacctgataggaatccgggcggttcttgcgggctgcacgcaggttggagatccacacgcccagccggacaccatcgctgtccacatagctggcggggaccagcaggtgcttgtatttgcgggcgtagcgggcggcactgcggaagttccgctcccagttggcctcgcgcacggtgccgtggtcagcggcgggatcactggggcggcgctcgcccttgaacagggtgcgcagcagcttgcggcgctcactgctcagggcgctgctgccggagttcagggcctgccgctggcggctgacccagctgcccagccaaacaccgtcggcggtcttgtagacagaggggatctccagatcgccgtgctctgtcttgtaggccagagccagatcatagcgctcctgccaggggtcgtacttttcccacaccatgcccagctcgtccagcagggccttgcgctcaggggtgacccgggcgctggagcggtccgggttcaggtaggcatagcgctggcgcgccacccacttgcccagcagtactccgtccggcgtgacatactccgaggggacgttcaggttgccgtgctcatggtagtaggcggcggcaacatcgtacaggaacatccacttgcggtcgttgcggttggtccagtccatgcccagagcgtccagccgctccacctgctcctgtggcagctcgcctgccttgtgagcggcgcgctgggcccccagccagacccccagaccgaagccggagggcgtttcgtacttgatgggcacttccagatcaccgtgctccagataatactgggtggcggcggcatagttctgctcccacaggtcgttggaggtgctccacaccatgccgatggcttccagccgctcgatgcggttctgggtcaggttgccgcccagatagcgctggcggttgtagacgatccattcgcccagtgcaaaatcatttttatcgcggtagcgcaccggcaccagcaggtcaccgtgctcggtgcggtatttctgtgcggaggcaaagcctttttcccaggcggtctccagccggtggttccagcggatgcccagtttttccagcttggcggcctgctcaactgtcaggcggcccgggcgctgcccggcctgtacctgccgctggagctcgagccacttgcccacgggcacgccgctgtggatggtatagctccggggcagctccagggtgccctctttggcggcggcatcggcggcagcctgacacagcacctcccagcgggcctccatctcccggcgcagcttgccgtacaggcggtaggtctgctgcatggggcgctcctgccggaagcccggcgttttgctgccggctctggtcatggcctcggtgcagtcacgctgcagggtgcggccattgcccagcccctcaaactgcgccacaaggtcgaacaccggcacgctgcggctgcctgcagccaccagcgcgcggcagagcatctgcttgaaggtggacatcaggctggattggcgcaccagaatgaccccggccagcccctccagcggctgctggactcccggcgcgttgacgcagagcagggccttggggccgggggctgtatcggagagaaaggtctccacggcagcagaatccgcaaagcaggcgtgatctgcagcgtaaaaacggacggcagggtccacagtgcgcagcagctgttccagctccgcgcccagcttttcctgataggcggcggattcaaacaggaccagataatggccgctggtatcgctgagcaggcggggcagcagaacggtcaggttctccacctgacgcagagaccagctcagctcttcatattgaacgcgcagggaggtgtcgcccttgggcatacacaggtttttgatccgggcgcgcagggtggccagctcctcctcctgaggccagagcagggctgcataagctgagggcaccggcatggtcccggcggccatggcctcggccacagtcatgtgggagacgatgcagtcggcaaacagctcctgcgcggcggcgcagacgggggcaccgttgggcacacccagccccagcacctttgcctgggggcacatccgcagcagcttctgtaccgactgcgcccagcacacggcgctcaactcatggtagcagtccagcacgacgcagccgggtttctgctcccccagccgcacccactgctccggggtggcggcggccagcttttcgcaatcacagaagcggacattgccgggcagggtgccgccgttgtagcgtgtcagctctgcctgccgcagggccagacgctgtgcaccggccaccagccagaaaaaggtggtctgggggtgagcctccaccaccttccaggcaatacagcttttgccggtgccggtggggtggaacacagcggcccggttcagggtctccagagactgtacagctttctgaaaagcggcttcgttgacgggattcagggtcatcgacatggtgatagtgtcctctccgagttgcatgtttgacat

SEQ ID NO: 558 - DNA, 16778 bp, unidentified
  source 1..16778: mol_type = unassigned DNA
atgcaatataaaagttataaaggagatagtggcatgagagaagaattattagcgatcatagagaagaacagcaggatcgatctgaaggaactggctgtgatcctgggagtggaagagatcgatgtggtaaatgaactggcagcactggaagcagaagggatcatctgcggttatcataccctgatcaactgggagaagacagacattgaaaaagtaagtgctctgatcgaggtacgtgtaactccccagagaggccagggctttgacagtattgcagagcgtatctacaaatatcctgaagtgcgcagtgtgtatctgatgtccggagcgtatgatctgatggtcattctggagggtaagaccctgcgggaggtatctaattttgtatctgacaagctgtccacactggattctgtgctgagtacagcaacgcattttatcctgaagaaatacaaggatcacggaaccgcatttgctacgaaaaaagaagatgaaagagagatgatcactccatgagaaatccattagcagataaagtagtggatatcaaaccatcgggtatccgcaaattttttgacattgtaagcgagatgcaggatgccatctctttgggtgtgggagaaccggattttgatactccctggcacattcgggacgagggtatctattccctggaaaagggaagaaccttttatacctccaatgccggtctgaaggatctgcgtcaggagatctgcaacacaatccggagaaaacagggcgtaacctatgactggcagcatgaagtgctggtgacagtcggtggctctgaggcaatcgatatcgggctgcgtgccatgtgcaatccgggagatgaagtcctgatcccccagcccagctacgtatcctatgaaccctgtgcgatcttggcaggagcgactccggtgatcattgacctgaaggcagagaatgaattccgcctgacagcagaggagctggaggcagccattacggacaagacgaaggtactgatccttccgtttcccaacaatcctacgggagccattatggaaaagtctgatctcgaggctattgcaaagatcattgagaagcatgacatttttgtcatgtccgacgagatctattcagagcttacctataaagagaagcatgtttccatcatcagtcttcccggcatgaaggagagaaccgtttatatcaacggcttctccaaggcatatgccatgactggatggagattgggatactgctgcggacctgcagccattattcagcagatgacgaagatccatcagtttgccatcatgtgtgctcccaccaccagccagtatgcggcagtggaagctttgaaaaacggagatcccgacatcgaggagatgcgtacagcctataatcagagaagacgctttttgatgaatgcgttccgtgagatggggctggagtgctttgaaccttacggtgcattctatgtattcccctgcatcaaggaattcggcatgaccagtgaagagttcgccaccagattcctggaggaggaaaaagtagctgccgtgcccggaaccgcatttggtgacagtggcgaggggtatcttagaatctcctatgcgtactccctggaaaagctgaagaccgccatcggaagactgggacattttgtagagaaattaagagcagaacaaaataataaataaagcatttttcagtaactattcggaaccacaggctgtaagtggcgctgaatagttactatgctgtagaggataaattatgcatattatattacatcagccggagatcccggcaaacaccggaaatattggaagaacctgtgtggctaccggtaccagcctgcatctgatcgagccgttaggctttcggttaaatgaaaaagagatcaagagagccggtatggactactggcagcatctggatgtcaccagatatatgaattttcaggagttccgggaaatgcatcccggagcgaagatctggatggcaaccacgaaagcacaccagacctacaccgatgtgaagttcgggccggatgactacatcatgttcggcaaggaaagtgccggaatccccgaagagatcctcgtagagcatgaagagacctgcatccgcattcccatgctccccgagatccgttccctgaacctgtccaactccgtagccattgtgctctacgaggcactgcgacagcagggattcgagagcatgcagagggatggggaacttcatagattacattggaaagagaaagaacaataggcctctttacaaaacgtccatggaaaggtaatatacttttataatgcgatttataaaagataatgaatgaggatgaatacatggacaaaaggaattctacaagaggcaggatcatcaactatatgttgaaccatccaatcacctccaaggcagaactttcaaaggaactgaatatcagtatgcctacggttctgacgaatgtgaatgaactgatttcccagaagctgttgacagaactgggggagtatgagtccaccggtggcaggaaggcgaagagcatcggtatcaacaagtcctatcgcagagcaatgggggtagtcatcagtgccaatcatctggaaatggtactgatcaatctgggttccgagattgaaaaaagcgtccgggtgcgtctgaagttctccacggatttttcctactgtatgcaggtgaaaaaggagataacgaaattcctgaagggaagctgtgcggaagaggaactgctgggggtcggcattgcgattcccggtatcattgatcagcagaaccggattgtattgaaatcgcatgctttgcagatagagaactacagtctgcgttttctggagcaggcactggaactgccggtatattttgagaatgacgccaatgcggcaatgttggcggaaaatccccagaaatatcaggatgccatctatctgtccctgaatcatacgctgggcggagccttttgcatcaacgggcagctgttccggggaaagaatcagaaggccggagagttcggacatatgatcctcattccgggaggacgtaaatgctattgtggaaaagtcggctgtacggatgcctactgtgcggaaagtgtgctgacagacgacaacaggatctcactggaaacctttatgacacaggtgaagaacaaagatgcggcagcaggcgtcaaatgggagaactatcttgaccaccttgccatcctgatctccaatcttcggatggcatatgatatggatatcatcctgggaggagatgtcggcggtgtcctcgcagagtatatgattccactcggagagaaagtcatgggatataatggatttgaccatgatgtctcctatctgaaaaactgtgcctatgaaaaggaagcatccgcagtaggcgcagcaagacacttttttgcagatatatgccattgatggaatactcaagtaatcaaataaaaccaggaaaacctgattcgtaatgctataccggcagatgcggatcagtttttttttaataaaattttatgacaggtagttgacaaatcttccctttgggatgataatacaaatactttaataaagtattttataaaagcgaatacaaaacaataagagagcaaaaacttataacaaaaaggagaggattattatgttacaggaagtaatgacaaaacccggcgagatcatattcagagagattcccgttccggagatcacagaggatcaggtgctggtgaaaatcatgcgtatcggcatctgcggttcggatattcacgtatatcatggcaagcatccctttacaaaataccccgtaacacagggacatgaggtatccggtgagatcgtgaagattggagacaaggtaacacagttccatgtgggacagaagatcactattgaacctcaggtatattgcggacactgctatccctgccgtcacggcaaatacaacctttgtgaagaactgaaggttatgggcttccagaccacaggtaccgcttcagaatattttgcggtagatgcatccaaggtgaccccaatccccgaggaaatgtcttatgaggaaggagccatgatcgagccgttggcagttgcggttcatggggtaaaacagatgggtgatgtgaccggtatgaacatcgtagttatcggtgcaggccccatcggtaatctcgttgcacagactgctaaaggaatgggagcagccaaagttatgatcacggatgtcagcgatctgcgtctggaaaaggcaaaagagtgcagcatcgacgtgtgtgtaaatacaaagaataaggatttcggagaagccatggtagaagctttcggcccggataaagcagatgtgatttacgactgcgcaggaaataatatcaccatgggacaggcgatcaaatacgcgagaaaaggaagcgtgatcgtactggtagctgtattcgctggcatggcggagatcgatctggcggtagccaacgatcatgaactggatatcaagagtaccatgatgtaccgtcatgacgattatgtggatgcgatccgtctcgtcaatgagaagaaggtacacttacagcccctgatttccaaagtattcccgttccgggattacctgaaagcttatcagtatattgatgataaccgcgagactaccatgaaagtcattattaatgtacaggaataagagggagacactatggacaacaaatacggagttacgggaattgcacatatcggaattccaaccaatgatatggaaaaaaccatagaattttacaggaatctgggatttcaggtattgctggagacttataacgaaaaggcctgtgaaaaagtagcttttctgcagcttcaaaattactgtattgaaaccttcgaaaaccatcaggcagtaatggcagacggcgcatatcagcatgtggcgctggatgttgcggatattaatgcggcctatgacaggatctgcgcggagggtcacaagattatcaccaatggtatagaagcattgcctttttgggaaaacggtgtgaaatttttcatgatcaaggggcccaatgaggaaaagatcgaattttgccagaaactttaaatacaggaagcaggtggattcagaatgaaaaaagagatagcgatcgcagcgttaggagaactcttgattgattttacagaagcaggtatcagtaaaaacggcaggaaactgttcgaacagaatcccggcggagcaccggcgaatctgttgacggtggcaagccatatgggataccggaccgctttcatcggaaagataggaaccgatatgcatggagcgtttctgaaaaagacgctgcagcaggaggggattgctaccggagccgtggtggaggatgagcattattttaccacactggccttcgtggaaattgatgaaaagggagaaagaaacttctcttttgcgagaaagccgggagctgatactcagctacagacggaggaactggatgtgaagctgctctctgactgtcggatttttcattttggatccctgtctctgacgcaggaaccgtcaaggggtacaacgctggaggctatccggatcgcaaaggacgcaggagcgctgatctcctatgatcccaattaccgggcatctctctggcccgatgaggagaccgccgtggcacagatgaaatcagtgattccgctggcggatgtaatgaaagtatccgatgaggagagtctgttactcaccggagctgctgactatgaggaagcggctgatcaactgctttctaatggtctgaaactggtggcaattaccttgggaagcaagggggcgctggtagcaacatcgacctacagagagatcgtgaaggcctttcctgtaaatgccgtggataccacaggtgccggggattccttctggggcggatttttaagctgttatctctcttatgacaaaaaaatggaagaccttggggtggaagaactcagaagatgcgccctgaccgggaatgcgacagcaggactgtgtgtacagaagcggggcggaattccttccatccccaccagaaaagaaatcgaagaatttatacgggagaggacggacagatgaaaatagttgccgtagtatttgacatggatggagtcttatttgataccgagcggatcggtgtgcagagctggacagaggcagcagagcctaccggtttgcaaaatgcttacgagattgcgagaatgtgcattggaagaaccattccgggaaccaaagaagtcttcatggcagaagcagaaaagcagggaatagtgttggatttcgagaaactgcatgccgactgcagcagacggatcttcgaaaaggaggagagggacgggctgccggagaagccgggggtacatgaaatcctcgaatatcttcatgagaaaaagattcctgttgcattggcatcttccagcaaaaaagcgacggtgctcagtcatctggagaagtccgggatcaccggctattttcagaagatcgttaccggagatatggtcacgcatggtaagccatcaccggatatctatctgaaagcctgtgaagaactgggtgcagcaccggaggaagtgatagctatagaggactcctttaacggaatccgatcggcttccgcggcaggattacatccgatcatggtaccggatcagctgcagcctaccgaggagatcctgttgctggcagaggcaaagtgtgacagtttattggatgtaaaacagttattggaagataaatacttgaaataaagaggagtgtagcagagggaaaacagaagatacataagggagctataatatatgaaattagcaacatcaacgaatatcatggatgcggactgcgacagaccgtaccggatccccgtcgatgtatctgccagagcatgtgcccgcgcgggctatcaatatgttgatgcctgcctgtgcagctattgcagagagggacaacccctgcggggagaatactgggaaaagtggatcgaagaaaccgtagcgctgaaagaagaactgaacatacagttcccgcaggcgcacgcgtactggacgatcggggaaggctttctcccggacagaacccgcagtgacggcgaactgggggaagaacttatgcggcgcagtgttcttgcagcggaagcactgggcgtgaaatggatggtcgtacatccctattccatgagccgtcacggcggatacgactatcgcggatcctataaatataatgtcgaatactggaaacgctggggagaattctacgcagagcacaatgtcggaatggcgatcgagaatatgaatcgaccgacccattacggcagctgcgcagaggaactgttagaattgatcgatgctgtgggcaatcctatggtgcagatctgcattgacacaggacatgccaatatggtgggactggatgtgccggcaatgatccgacaggtgggttttcatctgaaggcgacacatatcaatgacaatcatggtacgacagacgaacattttgcgccctataatggtacgattccctggaaagagaccgtacaggcattacgtgatattcattatcaggagtgttttgcattcgagatccaccatctgaccagtatgtatccaaaggaggtgcagtctgcactggtagatttttcctatgtactgggaacatatctgttgggggaacaacaggaataacacgtcgcaaaaatccgtgaaaagcagacaaacgaccggcacagcccatgtatgtgaatcgtggtagtgctggttttctgtacaaaaatataggaggaggcaagtaatgctgaatacttttacggaatattttgccggatttacgacaggagccattgcactgcggctgctattcgcggcagtgctgggctgtatcatcggactggaacgggcaacaaagcatcatcctgccggaatgcggacttttgcgctggtctgtctcggggcggcggcctctgccatcgtaaatatttatctggggacggctttcggaacagggcggacagacttaagccgtattccggcaggcgtagtcagcggaatcggttttctcggagtggggacgatcatcatcaccggaaagaatcaggtccgtggccttacaacggcagccggattgtggacgacagcgacactgggaattatgctgggctcgggaatgctgcagatcagtctgatcctgttcgtgctcattttcagtaccatgtttggaattgcgaggatcagtcgcgtgcaggaaaaatataaccgctatatcggactgtatatggaaattgacaagacaatgacccgcggtgtctatgattatatcaacgactgtgggtacgaattgtcttctatcgagaaaaagagagataagaccctgaaaggttccgatattgtgctgatcctgatgatggatctgaaaaaacgtagaaatcatgcggagatcctgtcggaagtgagccagcttgagggagtgcattatctggaggaagtatgactgaaatcataagattagcagattttacataaaatttacaatatgtacgtacataaaataaacagcatgggaaaaatgaactaaatatcaaataaaaataatgttatgttactcataataacaaatatgttttaaaaaatacaaaatatgtattgacataataaccaagtaggaatattatatagccataatgttactacataaaagggtgggtgaaatgtcagagaaaaagaaagtaaaaaatgctgaatatgatgtcgtagttatcggtggcggaatgtccgggatctgcgcagcactggcagccgcaagacacggggccagaacagcattggtgcatgaccgacatgttctgggaggcaatgcttccagcgagatccggatgcacatctgcggagcttctgagaatctcgcgaagccggatcttgaggagagcggaatcctgcatgagattatgctggacaacaagagcagaaatgattattataatttttcgatttgggatatggtccttttttcaacagtgaaaagacagaagaatcttacggtgtacttaagtacggcaatggaaagctgtgagatgggagaaggatccacgatccgcagcattgatgcctaccagctgactacggagacgcactggaagatatccggtaaagtcttcatcgattgcaccggcaatgcaacccttggatattatgcagaggcggaattccggacaggcagtgaaggcagggatgaattcggggaaccggatgctcctggacagccgaacaaggaacggatgggcaacaccttattattcaaagcggtggacagaggacatccggtggcattcaaaaagccggattttgccagaacctttacggaagaagaactgaaataccgaacccactccgcagtacatggagcacagatcaagggagaggtggacaaggcatatgtaagaatgacatccttcagtacttcttcggtagactacggatactggtggatcgaacttccgggtgagacagatgacatcattgacgagtatgagcagatccgggatgaactggtatcctgcatttacggaatatgggatcatttgaaaaacggtggcgaccatggcgcagaaaattacgatctggaatgggtcggaatgctgccgggttccagagaaggcagacgtctgataggggattatatcctgaatgaaaacgatatcctcagcaacagacagtttgaggatgccgtggcctacggaggctggccgatggatatccacacggcgaaggggctttacgattttgatgagcttccctccagagtgatcagcttcgacggtgcatatacgataccttatcgctcctattattcaaaaaatatttcgaacctgatgatggccggacgagatatcagtgccagcaagatggcaatgggatccacgagagtcatgggaacctgcgcagtcggcgggcaggcagtcggaacggcggcagcactctgtatcaaatatgactgtgatcccagaggggcgcaggaacatatgagggaattacagcagatgctgttgaaggatgacgcttatattcccggcatctggaacgaggatccgaaggatctggcgagaagagctaaagtcacagcaacctctgcacgggaaggctgtcccccggaaaatgtaatcaacggcatttccagagatgaggatggacaccggaacctgtggatctccggcaagggtagaaccgaaggagagatgcttacattgcatctggccgacagacagccggtatcggaagtgcatctgactttcgattccaatttccattatccgatcaagatcacgctgtcccgcaagaggcaggcacagcagaggatcggggtaccgccggaactgatcagagactataccgtaactctctggcagggagataaaaaggcagcgaagcagacggttacagagaacgttcaacggaaaaatatagtaacttttcctacaacagaatgtgacagggtcacggtaatggttcataagacgaacggcagtaatgaggcacatatttacgaaataagggtgtattcctgagatgtctttggatgaggggacgatcaggttgaccatagacaacaatacaaaggaggattacgatttatgaagaagaaaattgcattagtactgactatggcaatgttgggatcctgtctggcaggatgcggtcagaatgcagcagacgacagtgcatctgcagaacagaaagaaagcacagcggttgcacagtccacggaagcggcgcaaggtacagaagcaggggagaaggaatggttcggtaccgatgacggcaagaccgttacgattcgtctgtggggcggcgtacagccggaatatggatacgatgaagtgtgcgcaaactttaatgagcagtacaaagacaagggcgtacaggtagaatatgtacgttatgtcaacgacagttcaggtaatttacagctggagacttatctgatgggcggcggagatgtagatctgttcttcggatacggcggacgttccaagctggacaagcgtgtcgagtccaacctgttgttagatatgtccggtatgctgaaagattacggatttgatctggagacagaactgggtgaatccaatatgctggattacaaatatgatgatggatctgtttacggtttcccgacaaaatacgagaatgcaagatggctgatgatcaatgaggatatgttcaaggaagccggtattgatatcccttatgatggttggacctattccgaattcttaagtgcagtggagaagctgacccacggcgaaggtcaggataaggtatacggattgtgctggagccgtaagcagaactccagatatgtgcagctgatgctgaactccgtactgggttcctaccaatcctacaagaatgatgaaggtacggaagtgaacttcgataacaaggtatatcacgacggttttgagatggtaatgaagactctggacaatggctgggcaatccccattgaagatgagtactccgaggacctgagtgttgccaacaccttcctggagggcaaatgtgccattacactgggcatccccatgatgcgtctgtgtatggatcaggaaaattatcctcacgatttcgttactgcactggtacccgcacccgttcccgatgacgagcagtataataccgagttctacagaacccatgcaggtaccccaggtgccggcgacctgatgtgtattgcggccaacaccaagtatccggaagcctgcttcgagttcgctatgtggtaccttaagggtggtatggctcctttggttaagggaggaagagttcctctgtggaatggtatcgataaagaagctgttcttgatgtactgaaggcaaatgcagaaggctccattgatctggaatccatgaataactatctgtctgtggacagaacgcagggtgttaagacggtacagggtgttgcatctaccgaagtaagtgccgtatggaacgaagaatttgacgcaatgtgctatggcagacagtctgtagatcagacgatcgacaatatggtcaagagaagcaatgaactgatcaagacggaactcgaaagcaagaaataagtaacataacttacaacaaatcagcggaaaggggcggaagcgtttcaggtgatccgcccctgatctgaaacagataaacgagggaaaatgaatggaaaccaagaaaaagaaaagcaaaggggaaagacaaaaaatactgcatcagaatctggttgcatattcctttctggcgccgagcctgatcggtgtaatatgttttagcctgatcccgctggtgatctccctgtacgtaagtctgacggactggaatttcacacagggaatcggaaactggaatttcgtagggctcacaaatttcaagaatctgtggacagatgagtggtttaccgcttctctgaaaaatactctgctcttcaccattgtcaccgttccaatcggattgttccttgcaatcgtgattgcggtactgatcgacgagttctgccataaaaaggttgcaggtgtagtacgagtggcaatgtatatgccgcatatctgtaacatcgtggcaatctccgtagtgtggatggcactgtattccaaatacggcccgttcacccagctgatgaaagcgctgggctggcaggatcctcccagattccttgcaagttacgaatgggcactgccttcgatcatgctcgtagtcatctgggcaagtctcggataccgcgtcttcatgtacagtgcggccatcacaggactgccgagagatttgtacgaagcagcagaaatcgatggagcgaatccggttcagaagtttttcaagatcaccgtgcctttactgaaaccgactacatttttcctgacgatcacgggtatcatctccagctttaaagtattcggatataccaatgtcatgacaaagggtggccccggaagctctacctataccctggtttattatatatacacctcggcattccagtactacaagatgggttacagttccgccattgcagtgatcctgtttatcatgttgctgatcgtaaccattattcagtggatacataacaataaagaagagaaaggctagggattaagatgaagaatgtatctgtttccaaaaaagtgaccagactgctggttacgataatcatcgtggcagtcactctggttatggtaatcccatttgtctggatgctttccgcttcctttaagacagaagcggatgttatgaagatccccattgaatggataccgaaatatttctatattgataactacaaaaaggttttaagtatcggaaccacaagctctaccaattatcatttcccgctggcgtatttcaactctatcaaggtcgcagttatcagtacagtggtggcaattacctctgcgactctggcaggctatgcctttgccaagttgaagttcaaaggttccaatgtactgtttatcatctatctggcacagatgatggtaccctcccagctgacattgatccccagattcgtgatcttttcccagctgggctggatgaacacccacatgtctctgatcgttccgaagatcattgcagtatcctctacatttatgctgcgacagtccttcctcggaacaccggatgaactgcgtgaggcagcacgaatcgatggtgcgggagagtaccgtgcatttgcacaggttatgctgccactggtcaagccggccatagcagccaccgcaaccgtacagttcctggatgcatggaacagctatctggatccgctggtattcatctccaactggaaaaaatggacgattcctctggcgttgaaccagttcgtaggttccgaggtaacacagtacaatctgaccatggcagcgtgctgtctggctgtagtaccggtatttattgtattcctctgcggacagagatttttcctgaaaggattatctgtaggtgccgtcaaaggttgatcaaccaaacaagaaatgtatgcaggcaggaggggagagttctcatctcctgcctgttttgcaatcggagcagcgaagctcggaagaggagagtattatgtcagtacataaggaagaacgacattatgaagtagtggtagtcggcggaggaatggcgggcgtttgtgccgctatcgcatctgcgagaaaaggtgtcagaacggcgattgtgcagaaccgttccatgtttggcggaaatgccagctcggaaatccgtatgcacattgtcggggccaatgcccacggatccaagaagaatctgggggaaaccggcattttactggaaatcttactggaaaataagcggcggaatccctatgcgtcctttcctgtattcgattccgtgatctgggaaaaagtgcattttcaggagaatcttgatgcttatctgaataccgatatggacgatgtcattatggacggcaaaaaagtagcggccattgtcggccatcagaacaccacagagacagaatttacaatctatggtgatatcttcgtggatgccacgggacatggcacgctggcgaccatgggaggcgctgccggaaggatgggcagcgaaggacgcgatgaattccatgagccggatgcgccgacggaaccgaatcaggatacgatgggcaatacattgatgttctctgccgtagacagaggagagccggtgaagtttatccgtcctgactgggcatatcagtattccgaggaagatctgaaatacagagagcatggcaacagtatcggctcccatatggagggtggacagctgaccaagttcgaggagggcagcggaaggctgccgcatttctccaacgtggattccggttattggtggatcgaactgggtggccagtatgacgatattatccgggatggtgaagttattcgcgacgaactgttgaaatgtgtctacggagtctgggatcatctgaagaatgtaggggatcacggtgtggaaaatctggacctcgattgggtcggcattgttccgggctatcgggagagcaggcgtattgagggagattatctgctgaatgagaatgacgtgctggagaaccgtattttcccggatgcggtagcttacggcggatggcagatggacgagcatgtacggggcggtatccgggatcttgacaagattccttcccggatcctgaatttcaacggatgttataccattccctggagatgttattatgcgaaggatctggagaatgtcatgctggcgggaagagatatcagtacttccaagatggcatacggttccacaagagttatgggaacctgttccgttggaggacaggcggtaggtacggcggcagccatggcggtaaaatacagatgtactcccagagagattggagagcatatcatggagttacagcaacaacttctgcgggatgactgctatattccgggctttcgtaatgaagacccgctggactatgcgcggtcggcaaaggtatccgcatctgcctgtacaggaaaaaatgtgccggaaaatgtattgaacggtgtggcaagaccggtgcaggaggagagtaactgttgggaagcacccatcggagaggaaggagccagtatctctcttgatttcggtaaaaaactggtcttacagcaggtgcagctgacctttgatacgaaccttacgagggagattatgccatccatgacgcgaaatgtcagaaatcgtcaggtaaaggggctgccggaggaactggtctgtgattacgatatccgcttttacagagaggggaaagaggtcatctgtaaggaaatccgcggaaattaccagagactgaaccggattgttgtagataacgtcatttgtgaccgactgacggtcacagtgtataaggcatatggtatcgatcgggcacgtatttttgaaatacgtacttattagagacatatttacaataaattggtacatattatacgctcaattattgacattgatttctggaattcgatatactgtaagtaatgggaactattggaaacagcggacactggcactatataaaatgttgatagggagagacgggacatggcagcacgatactcggaaatcgaagaatatattatggataagattcatacgggagaatggccggtaggctatatgatccccaaggaagtggaactctgtgaacagttcggagtcagtcgttctaccgtgcgtacagccatgttgcgattggtacaggagggacatctcaagcgtgtgaaacgcaagggaacgttcgtgacgggcccccgtgttctggaggacactacggtatttattgagagtttctttaatgaaatgttccgcagagggatagaggtagagacggaagtgctggagttccgctacatggaggcgacggaggatctgatggagaagttcggcgacaactgccagaaagtaatcaaactgagccgtctcagatatgcaaaggattccttcgataaaggccctattgtattaacgacatcctatctgccagaaggagattcgttcctgtttgattatgattttaccaaggcatccctgacaacggccctgaaagagcatcagaagaatcgttacagtatggaaaaggaaatgactgcgctggtattgggcggacgagaaagccatctgatggggatgaaggaaggatctctggcaatgttgatcacttctattacgaagaatgataaaggacaggtgattgatgtaacagagagtatctaccccttagagcggaataagtttgtatggaaactgaagctgtag

SEQ ID NO: 559 - DNA, 8278 bp, unidentified
  source 1..8278: mol_type = unassigned DNA
tcacttttttgcgccgaacaggcggcgggccgtcacgaaggggccgccgcgggtcggcttgcagagatagacctgccggtagctgcttttgagggcggccacggccttgcgtgcggcgtcctgcctgtcaaagatgccaaagacggccgcaccgctgccggtcatctgggctgtcacggcaccatgcgcccgcagcgttttgcagatggcgggtgtttcgtccgcaccggagcaatgctcgagcgcattgccagccgccgcgcagacgccgggcaggtcgtttttgcggatggcctgctcctgtgcctcgcagtcagggtggacagggctgcccattgtgtcatagcgggcaaaggcttcgggggtggaaacgcccacgctgggcatcgccaccacgaaccagcagtccgggcagggcggcagggctttcatcagatcgcccacgccccgcacacggcaggtgccgcccatcagggcaaacggcacatcagccccgatgcccgcaccgatggcgcacagctcactcatcgaaagctttgcgccgtacagctcattcagaccgaccagcaccccggcggcatcggcactgccgccggccatgccagcccgcaccggtacccgcttgtagatcgtcatatccacgcccgccagcagaccggtataggcaaagaaagccagcgccgccttgacagcggtgtttttatcgttggccggcacaaagctgccgggcagatgcagcgtcaggtcatggctgcggcgcagcgtgattttttcatataggtcgatggtctgcatgaccatatccagatcatggtagccgttgggcagcgtgcccacgacatccagcgacagattcagcttggccggggccagcaccgtcacagaacggtattgcataggggtcactctcctgttatttgctctgcggatggcagggttacttcgtccagccgttctcgctcaaaaattcgcggatgcgcttcattgcgatctgcagatgatccacgctgtaggcatagctgatgcgggcgtacccctcgccggaggcgccgaacgccgagccggggataatggcaacctctttttcacgcagcagccgctcgcagaattcactgctcgtcaggccgctgatctggatcgaggggaacacatagaacgcgccgcgcggctcaaagcaggtcaggcccatatcgttgagcgccttgaccacataacggcggcggcggttgtactcgtcccgcatcatctcgatctggtcatcacactggcgcagcgccgtgaccgccgcatactggctggtggtcggggctgacatgatgcagctctggtggatcttggtcataaccttgatgagcggcgcggggcctgcggcatagccgaggcgccagccggtcatggcgtaggatttggagaagccgttgacgacaacggtgcgctcggccatgccgggcagcgatgcaatggacacatggcggtcgaggccgtaggtcagctcagaataaatttcatccgacagcaccagcaccttcgactcgcgcaggacggcggcgatctcctccatctcgtcggcgctcatgacggcaccggtggggttgttgggatacgggaagatcagcagctttgtccgcggcgtgatggccgcccgcagctggtcggcagtcaggcggaactgatcctcggcgcgggtagcaatatgcaccggcacaccgccggtcagctgggtgatcggctcatagcagacaaagcatggctcgggaatgatgacctcgtccccgggctggaccaccgcgcggatgatcaggtcgatggcctcactgccgccgaccgtgacaaggacattttcctctttatagtgcaggtcaaagcggcggccaaggtagctgcagatctcattgcgcagctccttcaggccggcgttggctgtgtatttggtgcggcccagctcaaggctgcggatgcctgcatcgcggacgctccacggcgttttaaagtccggctcgccaacgcccagagagatgcagtgcggcatttcagccgccagatcaaagaacctgcggatgccggacgggcgcattgccttggcggcaggggcaagcagttcatcgtagttcatcacaggacggtacactctctttcatcgggttcttcggccagatacagccggccaccgcgcttgtaggggcgcagcacaaagctggtggcggtggagagcacatcgtccagcggagagaggcgcttggccacgaagatcgcaatttcctgaaagctgcggcccttgatgatgacctgcaggtcgtagctgccgctcatcagcagcacggtatccacctcgtcaaactgggcgatggtcataccgatgtcgtcaaagccacgggccttgtggggggtcacacgcagctcaatgacagcctccaccagattgacgccggcctgttcccagtccaccagcgtttcatacccgcggatgtagcccttggcggcggcctcgtccatcatggcggcgatctcctcgggggtcttatccagcatcgccgcgatgtcctcgatcggcatgcgggcgttcttttccagaatacggagcaattcttccatagtaccacacctcactcaagtatatgcagctattatagcatattcgcggcaggattgcaccattgttttttgcggcaaagccctgccgcacacaaaaaaagcagcacccccgtgccttacacagggatgctgctctgttttttgtcagccctcggcaggctgttcatctgccgtctggggttcctccggctctgcgggctgttccggctctgcagactccggcgcaggctctgcagccgcttcgggtgcctcggctgtgcccagttcctcgttctgcatgttatccacaacggcatcggtcggcgcaggggtgggtgtgacctccacctgcatctcactctcctgcagggcggtcagataccactggcggttctccccgcgggtaaagacataatccatatacttcgtcggctcggtgggggctgtcagcgaaagctcaccggtggcgttgttcgtggcggtgggcacatagccgaccgtgacgatgcgcttgccgtcccggcggctgatcttctcgaccgtcggcgtatactgcgccacagagctggtgaccggcaccagataggcctgcttttcctcatcatactgatagacgaattcctcggtgctgaaggtcccctccggcaccttatactcagggccgagaaggttggcgatgtaggtatcgacctccagcgcggggatcatggccgaaccggtatcggggtcacgttcatactggtcaaggctgccgccgctgttctgcacctgatagacggtgccccagatggcggcctgcttgaatacgccggggtcaacgctgttcacatcgtcaaacgccacggggtccagcatgaccatgccgtacaggcggtcacggtacgccttgcgcaggccgctgtcgtccagcgccgagcgcacaagccctacgatccagcccagcacggtaaacaggccgatgagcgccagcagcagcgccacactgcccacgacctgccgtgccagacgacggttattgcgaatatgttcttctctgtaatttgccattgtggatgtgttgctcctttgggggattgaaaagcggtgcggcgggcttattacttattcttgtacatctgctcgtagtatttctggtaatcaccgctggtgacatgcgccatccagtcggggtgtgccagataccagtcgatggtcagcacaatgcccttctcgaacggggtctcggggtaccagcccagatcctccttgatcttggtcgggtcgatgccgtagcggcggtcatggccgagacggtcagcgacgtgggtgatcagctcctcgctgataccctcgtccttcaggcggtcatgcaactgggcaatgacggtcttgacgatgaagatgttggggcgctcgttatggccgcccacattgtagacctcgccgtccttgcccccctgggcaaccatgtcgatggccttgcagtgatccatgacatacagccagtcgcggatctgcatgccgtcaccgtagacgggcagcgtcttatgctgcttggcattgttgatgagcagcgggatcagcttctcggggaactgataggggccgtagttgttggagcagcgggtgatgttcatcggcatgccgtaagtgtcgtggaacgccttgacgaacatatccgcgctggccttggaggcagagtaggggctgtgcgggcacagcggggtggtctccataaagtagccctcggcacccagtgcgccgtagacctcatcggtggagacctgcagatacttcttgccttccttccaagtcttagcggcggcatcataccatgcgtccttgcagcactgcagcaggttcacggtgcccagcacattgctctcgacaaagatctcggggtttttgatgctgcggtcaacatggctttcggctgcaaagttgatgacataatccggatcgtacttggcgatcaggtcggtgacgagtgccttgtcgcagatgtcaccctgcacaaagatgtgacgggcgtcatcctcgatgtcctgcaggttctcgaggttgccggcataggtcagcttgtcgagattgatgaggcggatgtcctcatacttttccagcatatagtggacaaagttcgagccgataaagccggcacagccggttacgagataagtcttcatatatcaaagttctccattccagtttgcaaaaaagtccttgagggcgtcctgccagtcgcgcatctcatcgccgaccgtgcagcgcagcatacggttttcgagcgcgctccacgccgggcggttggcgctggccgggttggcggccgcgtactcggcgctggtgacaggctcgacccggcaggaaagccctgccccctgcatgatggcgcaggcaaagtcataccagctgcagatgccgttgccggtgcagtggtagatgccgtaatcgtggctgacggccagcttcaaaatatggtaggccaaatcaacggcgttcgtcgggttgcccagctggtcattgacaacggtgattttatcgtgggtctgacccagacggaccattgtcttgacgaagtttttgccgtaggcactgtagagccatgccgtgcgcacgatgaagtgccggcggcagaaccgctcaacatactgctcgcccagcagcttggtctggccgtaggccgagatgggtgcaggcacggcgcactcgtccagtgccacaccgccgttggcggtgccggggaacacatagtcggtcgaaacatggatcagccgtgcgccgattttctcgcaggcgagcgccagattgcgcgggccgagggcgttgactctgaacgccgcatcgcgggcggtctcgcaaccgtccacattcgtgaaggctgcgcagttgatgaccgtatccggctggtggcggcggatatagttgatggtggcctcgcggtcggtgatgtccagctcatcgacatccaccgggataacggtggccttgcgcagacgctcgggcagggggccgatggtgcagccctcctccgcaagctggcgctgcagctcagtgcccagctgaccacggcagccggtaatcaaaattttcatagattctctcccccgctccgatcaatactgcagcttgtcgtctgcgacattcttcaggtgctgaccgtaggggctcttgccgtagcgggctgcgctctcaagcagcttttccttggtgatccagccgtacttgtaggcgatctcctcgggggccgagatcttgatgccctgacgctgctcgatggtctgcacaaaggtagcagcctccacaagggagtccatcgtgccggtgtcaagccatgcatagccgcggccgagcagctggacatccagcttgccctgctccagatacatctggttcagggtggtgatctccagctcaccgcgagcgctgggcttgacctgcttggccatctttacgacctcattattgtagaagtaaaggccggtgacagcgtagttgctcttggggttggcgggcttttcctcaatgtcggtggcgtggccgtccttgtcaaaggccacaacgccgaagcgctcggggtcgttgacatagtagccgaaaacggtgctgcgccctgctgcggcgttggcagcagcggccttcagccgcttggagaagccggcgccgtagaagatgttgtcgcccagaaccatcgcgcagcagtcatcgccgatgaactcctcgcccagaataaaggcctgtgccagaccgtccggactgggctggaccttgtactgcaggtgcaggccgtactggctgccgtcacccagcagcgcctcaaagcgcggcgtgtccgtgggggtggaaatgatcagaatgtcctggatgcccgccagcatcagcgtagacagcggatagtagatcatcggcttgtcatagacgggcagcagctgcttggatgtgaccattgtcagcgggtaaagtcgggtgccggcgccgccggccaggataatacctttcatcgtttacaactccttattttattggtgcagtgcgcgccgcccatcccatcggggcataatctcacacaatacgattaaagtcattatacagcatttaagggccacacgcaagggggaaattctctcacccgccccgcattttttgacacgccggccggcataaccgcacccggcgcgcccctgcaaaagcggttctccgcccgcctttcgcctcaaattgtttccgttttgttacgatttctttgcagcgtcttgacgtaacgccccggctgtgctacaatacagaaagtataaatcacgatagcacgttgctgcatcgtttccaatagaagttaaagactgaaattaaggaggcgttttctcgatgaaacgctttttttgtgcggccttttttattgccgtcattaccttgctggccgcctgcggcgctttgaacaccactaccgccgccgcgcaggccaccgcaaccccgaccagttctacctcccgcacccaaaaaacaccgtccaccgttaaggtgaacgagaccgccgccaaggtggaggtcgtcacggcccagagcagcgccacaccggagtccacgacctccgctgcagccgagaccccggccaccggggattttcccgtgatgtatctcatcggcgtggtcgggcttatcctgatttgctccgccggtcttttgatgctgcgcaaaatttgagttctgaacgccctgcggggcgttttttgtttttattttgcagagtaccattacaaattgccaaaccggaaaggagtcccccgctgtgcccaaacgctaccgcaagctgcgcggggaaaccgcgtactacccctttgccgcccgcaccgggctgcgggcgcgccagcgccgccatgcgcgggcgctgcgcaccgccggtgccgccgcgctgattctggccgccgtgctggccctgcggcagggtgttttccgcggcggccagcctgatgcacccgccccgctgcccagcgcagcccccgccgtcaccgctgcaccgggggccgcccatgtgagagttcagccgctggctgccacgcgggacgcattggccgagacccagcaggccgacacgcaggcccacacaacgccggaaagcgccgcccagccccctgccgcccgcacggctgaggtcctgccccgctaccgcagcctttatgagcagaaccccgatctcatcggctggctgcgcatcgacggcaccggcattgacctgcccgtggtgcagacccccggcgacaacgaatactacctgcggcgcggctttgaccggttttatgccgtgggcggcacgctgtttctggacgagcgctgctcggtggagccggacgcccccaccgacaactggctcatctacggccacaatatgcgggacgggtcgatgttcggccagctggtgcgctaccgggacgaggccttctggcaagcccacccgacctttacctttgacacgctgtacgagagcgccacctggcaggtcgcagccgtgctggacaccgcgctgggcgcagacgaactgccctactacaccttttttgacgccgacaataagctggactggcagcgccgtgtagccgccatcaccgaaaaatcgttgtatgacaccggcgtcaccccggcgtacggcacccagctgctgacgctttcgacctgcggggatacccgcatcggcaccgatgcccgctttgccctgctggccgtccgggtagggtga

SEQ ID NO: 560 - DNA, 14196 bp, unidentified
  source 1..14196: mol_type = unassigned DNA
tcagctgtccatatcctcaaaggcctcaaggcccttcttcgcttcggccttggtgtcaccgtggcgcacaaagcacattgttacaaagctcagcgccacaaaggctgcggcgtaggggaagagtacgcggtagtcgatggcgcgcatcaggctgcccgcgacaatgggtgtcacgacctgcgcggccatcgagaaggtgtaataatacccggtaaacttgccgatgtcactgccgcggcacatctccacgaccatcggcagcgaattgacattgatggctgcccaggcaaggccgaccagcgcaaacaccacatacatgatgggctggatggaggaatagacggtcgtcagcagatagccgagcataaagcaggtggccagcagcacaatgccgcactggatcgtgcgcttgcggccgatcttggcggccagcgcgccgataggaatgtaggaaacgatggcacctgccgtggcaaccagcaggcaggtggacgcaccgcccagaccctcgcccatgacagcctcgacatatttggtaaaccaggttgtaacgccgttatagccgataaaccacagcgagatcgagatcagcaggaaggtcaggctgcgcttgaccggcgcgggcagcacctcatggccctgcccgtcatcggcagcaaggttccattcggggtgggctgcctccagcctttggttttcggcctcgagcttaggctccttgatggtcaggcagaggatcaaaacagccgtgaccatgataagcgaaacgatgaggaagagcggacggtagctgacatgcgccagcccgtggggcttggaggcggggtacagcactgccgcaagccctagatagaggatgccgcccacggcgcccatcagattgatgatggcattggcgcggctgcgcagcggcttgggggtaacatcgggcatcagcgccacagcgggggaacggtaggtgcccatcgccaccagcagcagacccagcaccacgatgaagagcaccagtatggccgggctggggttggcggcatagcggtcatccaacaggggaatcaggttcatcagcacagctgcggcggctgtgccgcccacgatgaacggcatgcgccgcccgattctggtgtgggtcttgtcggacagggcaccaaagaacggcagcaggaacagcgccagtacattgtccgccgccatgatggcaccggcgaaggtctcgttcagtttaaaggtgtcggtcaggatcagggtcataacgctgtcgtacatctgccagaaggtacagatcgacaaaaacgcaaggcccaccagaatggtgcggcggttgttcagcttcacggcaattctccttacttgcggggggataatccgccccatactgtcacctattgtaacactgtttgcatgtattgtctataaatttataaactttacagaagaatttgctcaaaaatgccgaaagtcagccgtttgctgtccgctctgcgtgggcacagtgttactctctgctgccgagccggtatttgaaatcctcatacccgaaggccgcgatactgtgcacagagccgtccgcacagcggcggaggatggctggcagcggcataccgttgaaggtgttgtttttgcaggtcgtgtagatggccatatcgccgaataccagcaggtcatccgcgcggggggcggtgtcaaagctgtaatcgccgatgacatccccggccagacaggtcggcccggcaaggcgtaccgtgcagggcttttcaccgggttcctctgcgcccagcagcggcgggcggtagggcatctcaatgacatccggcatatggcaggcggcgctggcatccagaatggctacggtggtatcgccgtttttcactacatccagcacgcgggtcagcaggtaaccggcattcagcgcacaggcctcacccggctccagatagaccgtcacgccccacgcattctgtgcgcgggcgatgcagtgttccagcgtggtaatgtcgtagccggggcgggtgatgtgatgtccgccgccgaagttgagccattgcatgttgggcagcagatcgccgaatttttccgccacggagtccagcgtcacggccagtgcatcggcgtcctgctcgcagagagtgtggaagtgcagtccgtccaaaagctgcggcaggctggggtcctgcgacacggcggcatcccacgctgcgcgggtcgtaccaaggcggctgccgggcgcgcaggggtcatagatcgcgtggccgtcctgcgtggagcattcggggttgatgcgcagccctacgcttttgcccgccgccttgacctttgcaccgaattgtgccagctgtgcaggggagttaaagacgatatggtcggcatagcgcagcagctcgtccatctcgtccgcgcggtaggcggcgcagaatacatggacttctttgccgggcatctcctcggcacccagccgtgcctcaaacaggccgctggcctcggtgccagccaagtgcggcgtcagcaggggatacaggtcatagttgctgaacgccttttgcgccagcagcaccctgcagccggtgcgctgtgccagcccgcccagaatctccgcgttgcgggtcagggcggcctcgtccagcaggtagcagggcgttggcagggcggtaaattccggcggcaccgtgccgccgatggccgcaaacggcggccgtgcatcgtgcagtgccatcagtccaccagaaccgggttgtggttctcgctgcggggcaggccgtacttgtccagtgcgtcgaggaacggatcggggttgaactcctcgaccgtgtagacgccgggcttgacccactcgccggtcagcatcatcagggcaccgcacattgcaggcacaccggttgtgtagctgatggcctgactgccgacctcgcggtagcactcctgatggtcgcagatattatagatgtagtaggtcttgtccttgccgtcctttttgccggtgaagatgcagccgatgttcgtcttgcccttcgtgcgggggccgaggctggcgggatcgggcagcagtgccttcaggaactggatggggacgatctcctgaccattgtagttgatgggtgtggtggagagcatgcccacatcctcaaggcagcgcatgtggtcaaggtagctctggccgaaggtcatgaagaaacggatgcgcttgacgccgggcaggttcttgcccaaagactcgatctcctcatggtgcagcaggtacatatccttctggccgacctgatcaaagttgtactcgcgcttgatgctcatagccgggatctcgacccacttgccgttctccatgtagctgccgggggcagagacctcgcgcaggttgatttcggggttgaagttggtggcaaaggcgtagccgtggtcaccgccgttgcagtccagaatgtcgatcgtgtcgatggaatcgaactcatgcttggcagcgtaggcgcagtaggcctgggttacgcccgggtcaaagccgcagcccagcagggcggtcaggccggcgtcctcaaactttttcttgtaggcccactgccagctgtagtcaaagtaggcggagaagccggcctccttgcagcgcttctcgtagatggcgcgccattccggatcatcagtgttttccggctcgtagttggcggtatccatgtagttgacgccgcaggcaaggcaggcgtccatgatggtcagatcctgatacggcagggcaatgttcatgacaaggtcaggcttgtaggcgttgatgaggtcgcagagctgctgcacatcatcggcatcgacctgcgcggtggtgattttggtctgggtgtgcggggccagcttggcggcgagggcatcgcacttagacttggtgcggctggcgatgcacagctcggtgaaaacatcgctgacctggcagcacttggagatggcgacagatgcaacgccgccgcagccgataacaagaactttgctcatgatgggactcctttgcattttttattgtatgatgtgtatgggtattttgtaggggcgaacattgttcgcccgtgcctgtttaaggcagcggcaactttcgcggtcggatatggaatccgcccctacatccgctcccccgataaggttgagaatgtagggaggggtcttgacccctccgcggtgcgtcgaggacgccgccccctacagggatggctgcttacttttccagcgccagcagtaactctcttagcaccttgcaggccgtggcggtcgaaacgccgctctggtcaagcatgggggccagctcgttgacatccgcgccgatgatgtttgcctttgtcacggtgcggattgcctgtaacagctgcagaaagcttacgccgcccgcctcgggtgtgccggtgccggggaacgccgaggggtcaaggcagtcgaggtcaatggtcaggtagaccggcacgcgcgtctggcacagccagtcggtcagctcggccagaccggtgaaatcgaaccggtgcatatcggtgtggagggccgcgaactgaaattcctcccgctcgccgctgcggatgcagaactggtggatgcgcccgtcaccgatcagatcatggcagcggcgcagcacgcaggcgtggctcagctgcgcgccgaggtaatcatcccgcaggtctgcgtgggcgtcaaaatggacgatgtgcagatcgggatatttgcgcacggctgcgcgcacggcacccagagtcacaagatgctcaccgccgagcagcagcggcagcttgccgtcccgcaggatctccgccgcgcgggattcaatgtccacaagggcactctcgcttgagccgaaacacagctccagatcgccgctgtcaaacacattgccgtctgtcaggtccttgtcctgataggggctgtaggtctccagaccgtagctttcgtgccgcatggcggcggggccgaaccgcgcgccggggcggtagctggtggtggaatcaaacggtgcgccgtacaaaacaatgcttgccgtgcggtagctgctgtcgcagccgatgaaattttcaacattgcgatgcagcatcagtgttcctccacttcgcgcagcatttcctccagaaacgccggcaggtaaaatgcaccgacatgcagccgggtcgtgtaatagcgggtgcgcatgttcagtgcattccacgcatcggcgtccatatcgttgatgggatgatattttttgctggcaaagccgaacagccagtagcccgccgcaaaggtagggatgtgtgcctgatacaccttgctgatcgggaaggtactggcgatgcgcttgtggctgcgctgcatggcggtcgcgtcatcagcatagaaggggctgccctgttggttgaccatgatgccatccgcgcgcagcgcgttgaagcagttgccgtaaaactcgcgggtgaacaacccctccgacgggccgaacgggtcggaggaatccacgatgatcagatcgtactcgtcctcacaccggcggatgaatttgagcgcattctcgtagtagatatgcacgcggcggtcatccatacggcaggcgttgccgggcaggtaggcgcggcaggcctcgatgacctgcgggtccatctcgaccagatcgatgcgctcgacccggtcatagcgggtcagctcgcgcacaacgccgccgtcacccgcgccgatgacgagaatgtccttggcatttctgtgtacggccatcggcacatgggtgatcatctcgtcatagatgaactcatcgcgctcggtcagcatgacattgccgtccagcgtcagcacgcggccgaactccggcgtttcaaaaatgtcgatgcgctggtagtcgctctgcttggagtagagctggcggttgacccggatgctatgcttgacatccggggtgtgaaattccgaaaaccacatttccatactgcaaacctccctgtcaagccagcacattcaggcgcagaatgtccgggtcctcggggccggtcatgctgcagcccttggccttggcatactcgatataatccagaatctgcgcggtgatgcgctcgcccggggcaaggatcgggatgcccgggggatagcacatgacgaactcgctgcagaccatgccctctgtctcgcgcaggggcaggctctttttgggggcgtagaacgcctcctgcgggctggcggcaacctcggggtcgatgtactcctgactcaagagacccgcgccatcggtgtgatagcggcgcttgatttcagccagtgcgctgacaagacgctcgacctcctgcgggcggtcaccgatggagaggtaggccagaatgttgccgatgtcgccgaattcgatctggatgtcgtattcatcgcgcagaatgtcgtacacctcaatgcccgcaaggccgatatccagcgtgtgaacactcaattttgtcgtatcaaagtcaaaaacggagtttccgttgcaaagctccttgccgaaggcgtagtacccgcccacggcgttgatctcctcgcgcgcgtactcggccatgtcggctacctgatggaacacctgccggccccgcagtgccagattgcggcgggaaatgtcaaggctcgacatcagaagatagctgccggaggttgtctgggtcaagttgatgatctgccgcacatagcccgcatggacattgggaccggtcagcagcaggctggactgggtcaggctgccgccgctcttgtgcatagagacggaggccatatcagcgcccgccgccatggcggagacaggcagtccgccgccgaagtagaagtgggtgccgtgcgcttcatcggcaaggcagagcataccggcgtcatgcgccatccgcacaatggcgcgcagatcgctgcagatgccgtagtaggtggggttgttgaccagcaccgccacggcgttgggatgctcggcaatcgctttcgcaacctgctcacgcttcatgccaaggctgatgcccagccgggtatcgacctcggggttgacatagaccggcacggcaccgcacagcaccagcgcgttcagcacgctgcggtggacattgcggggcagaatgatctcatcgccgcgcttgcaggcggtcagcaccatgctctgcacagagctggtcgtaccgccgaccatcaaaaaggcattcgccgcaccgaaggcctcggcggccagttcctcggcctcccggatgaccgataccgggtggcagaggttatccagcggcttcatgctgttgacatccaccccaacacactgctcaccaaggaaggcggtcagctcggggttaccgcggccgcgcttgtgcccgggaacatcaaaggggacaacgcgcatttttcggaacgtttccagtgcctcgtggatcggcgcacggcgctgatccagacgggaacgcttcggatctccgttcatttttccctccgtccgcggttcctttgcaaacaaaaaagcgcaagccatgcacagatgtacaggcttgcgcttaaattcagcattttttgcacaggcagaaatacccccggtcttgcaccgagagagcatttttaccgtatgattcaaaaaggctgagcgtgtcagagtctatatagcaattacacttttactactcttattgaccgtttcacaagtctgcacgatacccgtgcaatttcatggttgtaaaggaaccaacttataaaatttgagcttctaactcaatcaataaggcaacctgcgttgccgatcggcagtggacccggctgtccgtatggccatggggcaaaacgaagcttttgcaatcgcccgccccgcccctgttgggcggtccgtaggtaaattgctttgaaaaactcttacaaactcgattcgtctttcaaaatcgaaagaagtatagcacagatatggtgcattgtcaagaaaatgcgagatattttttcacgcttttcacaaagtgtagcgcactccagaagggggagctgtggagggtgcgtatccatcagtggcagctgtggtttccgcagccatggctgccgcaggtgtggccgccctcgccgtgcgcttcatcgtggtgggtgcagcgcacatcggggtcatagcccagcttgcccgccagcagggccagcacggctgcatcagcatcgccgctgacaccgccgtaaagacggatgccggcctgcgtcagggcagcctgtgcgccgccgccgatgccgccacagatcagtgtatcaacgccgttttgtttcaaaaatccggccagcgcaccgtggccgctgccgttggtatcgaccacagctgtgttgaggatcataccgccggaaacctcgtacagcttgaactgcgcgctgtggccaaagtgctggaagatctgtccgttgtcgtaagtgactgcaattttcatggggggatactcctttgttacgatgtgggtcggaatagacataactttgccaaatgcgaagggcaggggttacaggtatcggactgtctcggtcagcggtttgcgggcgctgtggttcggcagcggcgtgacaccctcagcggcaaagcccagatcaaggatcatgaggatctcctcgttttcaggcagtccaagtgcctgtgccagcttgtcggggtcaaaaaagttcagccagcaactgtccacaccggtgttggcggccgccagcatcaggtgcgttgctacaatggacgcatcctccacgccggagtcccgcttgccgccgggatatgtaaaaacattgctgcggtcaaaggctaccacaaggcaggtcggtgcgccgtaacggcaaggcgttgcagcgtcgatcttagccagcccctgtgcagactggatgacatagatgcgctgctcctgcaggtttttggcggtcggtgcgacccggccggccgcgaggatcgcgtctaactgtgcgggcgcaagctggcgcgcgctaaaatttttgcaggaatagcggctttcaatgacctgtgtaaactccatcagaatagccctccttatatggcggcggtaaagagccgcctttatagtttgattctaccaccgaaccgcgcggctgtcaattttagggcaatactgcataattctaagtgccgatgcggcgctttgctttgcattccggcgggattgctggtataataaatgtatcccatcaggccgcctgtgcggctaaagaaaggtctccgctatggaaacaccccctcagggcacggccctgtttcatctgcccggtctgtttgagttttatgacttgtatgcggcgtttttgccgctttaccgtgcgcatagggaatatttttacgactggtgcgccatcggctcaatctacggcgcaccgtctgactgcttatgggcgggcggccgggtcgagtacagtgaccgcaccccgcgcgaggtgctggcgctgacgcatgaatatggcatctcggcgcggctgaccctcagcaattcgttgctgcgcccggagcatctcacagacccggattgcaacgcgctctgcaggctgtttcaggaacaaagtaatccccaaaacggcgctattgttcatgctgaactgctgacgcagtacctgaaaaagaactatccttcgctgtatcttgtctcctcaaccacaaaagtgctgacagacttcaatgatctgcagcgggagctggcgcggccggagtttcgttatgtcgttccggatttccgactgaaccgggcgtttgacaagcttgcagcgctgccccagtcccagaaggacaaggtggagtttctctgcaatgagtgctgctggttcggatgcacggaacgcagggtctgctatgaggccgtcagccgcaaaaatctgggtctgcccggcccggagcatcactgcagcgcccccggcgcagcaggagggtatcgcttctcccgggcgatggcaaaccccggctttatcggcatcgaggctattcgggatacctacctgccgatgggcttcacccaattcaagatcgaggggcgcggccttggcagtgcgctgatccttgaatttttgctccactacctgacccggccggaataccagctggctgtccgtgaggagctgtatctggacaatatgctggaccttttctgaccggctttgtgatgagccggggaaagctgtttgcatttttctccgatttgcgttataatggcaaaaagcaacaaaaagcaggagaccgccatgaacaaactactactcatcagcgctatgcaatatgactttcacacgcttttaaaggtggcggatatctgcggctttaccggggaaatcggctttcacgatgctgaggacggttatctgctcaccttccctgacaacgatggccacgccgaccgccgcattgcggagtaccgcagccgccttcgcgaccttgaacataatatctggaaccgctgaaagcgtatcccgccatttttatctctgccaagtgcgccttgctcttggcagatttttttgtgccgtatgttaccccagcgccacatccagcaccatcatcacactgaagccaacggcaaagaatactgtgccgaggttagagtgccgtccctgcgacatttcggggatcagctcctccaccacgacatagagcatcgcacccgccgcaaagctcaagagataaggcagtgccggtatcacaagctgtgcggccagaatcgtcaccactgcgccgattggctcaaccacgcccgaaagcacaccgcctgcaaaggccttgcccttgctctccccttcggcgcgcaggggcatcgagatgatggcgccctccgggaaattctggatggctatgccaagggacagggctagcgcgctcgccgcggtgatctgcgcgctgcctgcgagaaagccagcgtacatcacaccgactgccatgccctccgggatattgtgcagggtcaccgccagcaccatcatcgtagtgcggcccagtctgctttttggcccctcagcctcctcactgccgacatgcaggtggggtatcagatgatccagggcaagcaaaaacagcacgccgaaccaaaatcccgcaaatgccgggaaaaaagcaaaccgccccaacccctccgactgttcgattgccgggatcagcagactccagaccgatgccgccaccatcacaccggcggcaaagcccgcaagcgagcgctgcaccaaatcacccaatgcgcgccgcataaaaaatacgcacgctgcgcccagcgatgtacccaaaaagggaatcagaatcccccaaaaagtttctgtcaatgaagtcgcctccttttataatatatagacataaacacaggtactttataccctttcctgccccccgcaggcacagtcacttcgctttacggcggtcaaacacagccagcctgttttgcttttgtgtaccgcaatgtcacaaaagcccgcttgctcaagatatgatttcagctcagtatccttgtagatggtcatgccaccaatgatttctgtccattttttgtctttgtccgtgtcgccgttgacttcattgcagatgaggaaggtgccgcccggcttcaaaacccgccaaacctcccggaagcattttgcaaggtccggccagaaatagacggtttcaaacgcggtgactgcatcgaaccaatcactggcaaaaatgatgcgctgcacgctgccctgccagatggcacagcgatccctttgaatcgcctctgcattgagacggcgggatttttcgacgctgacagcggagtaatccacgccctttacgatgccgcgcggacaccttttcagcagccgtttgatattcgctccgccgccgcagccgcagtccagtacctttgcgtccggcgcaagatgcagaaagtgaagcccccacagcgccacgggggtgtgagcaaggttcatcatggtgaccatcagcctgccgccgaagcctttggggtctcttgtattttcaaaaaatgacattgttattctcctttcgattttttacactctgcgtaggtaagcggaatggaattctgcaaaacaacacttttgcaaacggtccagccgttttgctgcaaaaatgccagatacgcagcactcgtccatctgctgtgcagcggaaagcctgcaattttcagcgcaagggcctgaagccttccacaatgggaattctctgcatgggtaaaggtcggcgcaatcagcatgccatcgtttttaagcacacggcgaagctcggtgagtgctttctcaggatgcggtacaatgtgcagtgcattggagacaatgacaacatcaaaggactggtcagcataaggcagatggaacatatcctgcacggaaaaatacagcttggaggaaaaattgccccgctttgcctgcgcaatcatcgctgcggaggcgtcggtagcctcaatgtgatcggcagaacacaggagatgctttgccacctgccctgtgccggtggctacctccaaaacggttttgcgccacacagcagggcgaagcagcgcatataattgatcataggctattgcattcttacgcataaagcggtcataccttgctgcatttctgtcccaaaaattctttttcgtaatgctcagctccttggtttacatcaactaactgctgcttatttgaaaagctgcccggcggcagcatagaagcttgtatatgcgcgttagaataatctaaccgttggatcgtaaaaaagctgcctgcagccaaaacggcgcaccagcaacgattctacgatatttctgtcatataataacagtctggcacccaaatgtcaatagggtgctacaggtgcttttgtgcgtttgaatttcaacaaaaaatctatagcgggcagtgcgttttacactgcccgctatagggatgcttactttaaccgttttcgtccttgggaatggccagattcaagaggatggcaacgagtgcggcgggcacaatgccggagccgccgaataccagagagagcatctgcggtgcgtgtgcaaggatgccgttgttggcaccgatgccataaccgagaccgagcgctaccgagacgatgctcaggctgcgcggggtcagcggctcgcgggtgatgagctgaataccgctcaccacgatcgaagagaacatcatgacagctgcgccgcccagcaccgactgcggcatgatcgagacgagcgcgcccagcttgggcaccaaaccgcagagaatcaggaagatgccgccggtggccagcgcaaagcggttgacgaccttggtcatgctgacaaggccgacattctggctgaaggaggtgttgggcagcacgccgaacagtgcggcaaagctggagccgataccatcgcagatgacgccgccggacagctctgtgtcggtggcctcgcggtccatgccgcccatgataacgccggaaatatcgcccacggtttcgactgccgtgacgatgaacataatcatgaccggtgcgattgcgcgcatatcaaacaccggtttgaccggcatcagctcgggcaatgcaaaccatttggcctcggccaccttgttccagttcagtacccatgccttggtataggcaacgccctcggcgttcagcgccgtggtgggcagaacaaggcccatgagaaacgctgcaatgtagccgcagatgatgcccaccaaaatcgaggaggaattcaaaaaggtgctgccggagtgcttgcagatcaggatgacgaccagcacaaagatggcgagcagcaggttttcgaccgagccgaaatcctgcgcggtgttgccgccgccgaaggaattcacaccgaccgaaatcaggctcagaccgatggaaagcaccaccgtgccggtaacgacagagggcagcagcttgcgcaaaggcttcagaaagaagcccagcacggtctcaaacaggccgccgatcagggaggcgcccatgatcgcgccgtaggccagcacaccgccgcccattgaggctgcgaccgagctgaacaccccgatgaagccggaggaggtacccatgataataggaaccttgccgccgatggggccgatggaatacagctgaaccagtgtgacgatgcccgccacaagcatggcattctgcagcagcgtgacgcgcaggtcggcaaattcgccgccggcaagaccgcaggcacccgtgatgataagcagcggcgtaaggttgccgacaaacatcgccaacacatgctgcatgcccagcggcagtgcctgcttcagggacatcttgccttcaaagcggaaggcctcgggggaaagatcgttttttttcat

SEQ ID NO: 561 - DNA, 9470 bp, unidentified
  source 1..9470: mol_type = unassigned DNA
atgagaacatttgaagatataaagattgcggttgcaggaaccggctacgtcggattgtcacttgcaaccctgttgtctcagaagcatacggtgacagcggtggatatcgtgcctgagaaggtggagaagatcaatcataagatttctccgattcaggacgattatattgagaagtatctggcagagaaggagttgcatctgacagcaaccttagatggagggacagcataccgcgatgcggattttgtcatcattgctgcgccgacaaactacgacagtcagaagaacttcttcgataccacagcggtggaagccgtgattgaacttgtgctgaaggtgaatccggaagcatttatggtaatcaaatcgacgatcccggttggttatacggagtcagtaagaaagaaatatcagacaagccggattctgttttctccggaatttctgcgggagtccaaggcactgtatgacaatttgtatccaagccgtattattattggtacagataagtcggatgcagaagtagatgcggcggcgcatacttttgcacggttgttgcaggagggcgcagaaaaggaaaatatagatacgctgtttatgggatttacggaagcagaagcggtcaagctttttgcaaacacctatctcgctctacgtgtatcctatttcaatgagttagatacttatgcagagatgaaagggctggatacccaggcaattattgatggtgtgtgcctggatccgagaatcggaacacagtataacaatccgagcttcggttatggtgggtactgcctgccaaaggatacgaagcagctgcttgcgaattatgacagtgtgccacagaatatgatgacggcgattgtggagagtaaccggacgcggaaagattttattgcgggtcgcgtgcttgaaaaagccggttattacagctatggcgcgaacaatgaatggaatgctgaaagtgagaaaaaagttacgattggtgtctatcgactcacgatgaaatcaaattcggataatttccgtcagagttcgattcaaggcgtgatgaaacgtgtgaaggcgaagggggcaagtgtaatcgtatatgagccgacactgccggatggaacgacattttttggctccaaaatcgtaaatgatctggtagagtttaagaaacagtgtgatgcaattcttgcaaaccgttatagcgcagagctggacgatgtgcaggaaaaggtatatacaagagatatatttcgaagagattaaaggctaagaggaggataaacatgaaaaagtatgattatttagtggtaggtgccggactttacggtgcggtgtttgcacagcaggcaaaggaaaaagggaaaaaggtgcttgtgattgacaagcgtccgcatattgccggaaatgtgtacacagaggatgtagagggtatccatgtacacaaatatggtgcgcatatcttccacacgaacaacaaagaggtatgggattatattacgaagtttgcagagttcaaccggttcacgaattcaccggttgcaaattacaaaggcgagctttacagcctgccgtttaacatgtacacatttaataaaatgtggggtgtggtaacgccagaagaggcagcggaaaagatcgaagagcagaaaaaggcagctggtatcacggagcctaagaatctggaagagcaggcaatcagtctggttggaacagatatctatgagaagctggtaaaaggctatacggaaaaacagtggggacgcccatgtacagagcttcctgcgtttatcatcaagcgtctgccagtccgtctgacatttgacaacaattatttcaatgcgctgtatcagggtattccgatgggcggctacacgaagatggtggagaaccttctggctggtattgaagtaaaggtttctaccgattattttgcaaacaaagcggagtatgatgcgatggcagagaaggttgtctatacaggtgccattgatgcttattttgattataagcttggcgcgcttgaatatcgttccgtgcggtttgagacagaacttttagacaggccaaacttccagggaaatgcggcagtgaactacacagatgctgagacaccttggacacgtatcatcgaacataaatggttcgagtttggcaaggatgatgcaggcaatgatctgccaaagaccgttgtttcacgcgaatactcttctgagtggaaggtgggcgatgagccatattatccggtaaatgatgagaaaaatggcgcgctgtatcagcagtacaaggagcttggcgagcaggaggagcatgtgatcttcggcggacgtcttggcgagtacaagtattatgatatggatgcagtaatcgcatctgcacttgcaatgagtgagaaagagctgggcaaataacagcaatacgataacaatcaaaaagagcagttggaaacagatatgtgttccagctgctcttttggtttctgtgaatttgttttgcgaaaactcaaaagtgttatcgtaacagttccagaattgtatttaccatcaggtcgttctgcatcggattcatgattgagaatcgtacaaaatgcgaatccaggccgtgaaaattctcgcagttccgaaggacaatgcccttcagattgcaatgtgccagcagggattttgcagtgacatcctcttttagaatctgcatcagcgcgaagtttgcactcggtttgaacaaccgcagattcttgtttgtattcattgctgcgtagatcaggttgcgctcggtaaagatgcgggagtgcgattcgtggatgtaggcggtatcctccagcatagcagtacaggcagctgcggtcagacaggaaatgctgtttggtgtggcggtcatattgatgatcgtcatgtttgtttcgttgttcatgatcgcataagcaagtcgcagtcctggtacagagaagaatttggatacgctgcgcaaaataatcaggttatcataggtatttaccagagagatcgcagtgttacgctcatagttctctgtaaattcaatgtacatttcgtcgagtaaaagtgcgatgccaagctccttgcatgcggctgcaagtttctcgatatctgcttttgatataagctgggaggttggattgtttggatttccgaggattacaatatcgtatgtatccgataagtgtgcaataaaatcatccatatccagatggtaatcctgattgatgtccagctcatagaagtctgtttcgcaaccatacacggataatacatgttcataatccgtggctgatgggatcggcagtaaagccttctttggtgcaagaagtgcaacaaagagacgcagcagatcagagctgccgctgccaagcaccaaatgctctggcgcacagcaggcataagaagcgatggcgttccgtaaagggtcgtagtatgtgtcaggatagcgaccgaccgcgctgatattttccatgatcgcgcgtgtcacgctgtccgggacaccgagtggattgcaatttatgtcatatcgcacagtctcatactgttcgatgcgaagtggtccgttgctcatagtttcctcctaataattagaaaacaaaccatttatatccctgtcttgaaaaaagaaagggggtttgttataatgtgatatgtgttaaaaggggatagtgggtgaactataccctcatatcgataattatacctattaaatagacgaatgacaagtaggttttcattacgaagccgagaaataaaggagataccatgaaggcgatagtagaacattacgcaaagggcgaatttcaggtagaccggcctgaggtagcgatatcagaaaagtttttaaaactgaatatagaatcgggaactttgtacgaaggtgtcttcacggtgaacagcacgaatgaccacgtcatcaaagcgatggtgtatgatagccgctatatgctgcggttcaaccagcatacatttattgcgaagaattttgatgtcggattcacattcgatgcaacctgtttggaagcaggtaaaaattacaaaggacatatcagtgtcattacggacggcggagaatttaagattctgtatgatattgacatcacgacaccatatgtaaaatacggagatcagaagatcgatgatcttttcaaatttgcgacactcgctgagagcaactgggcagaggcggcgcgtgtatttgtgcgcgatgattttaagcgtacatttatcaaccgcgatccggtgatcaagcagatctacaacagtctgatggaaagccagtcggtcaatcaggctttggaggaattcctcgtctatgtacacaagaaacgtgcgctgacattgtcagtatccaaggcgaagatcaatctggagttcccggaggagctttccaagatttcgattaacatcagcaaaaacacatggggctacagcagttcaacggtacgctccaccgaggatttcattattccagcgagaaaggtgattacaagtgccgatttttatggcaatctgtatgctttggatgtactgatttcaccggagaatattccggacggcgtgacatccggcagaatcattatcgagaatgtctaccagacaatcgagattgagattaacctgtccaagccgacagaaaaagagataaaagtgtccaaaccgggcagcaaaacacatctgattaagtcgaatcaggtgcgcttgattacgacatatatggattaccgcatgggcagaatccagcttcgggaatacattagcacgaccttatttgcatttaacaatctggcacgctatgtaccagaggaagatctgtaccgtctgggaacaatgcatatgaacattatgcagggagagacagagaaggtagaacaagaattcctgcgtatcgaggcggatgtcgataactctggaatgaacaacaagcagagttgttattatgcatatctgaaggcgatggttggcaaggaccgccgtgcgaccgaacaggcaaaggaactgattcgcagaagctaccacacagaggatgacaagatcttctatttctggttgctgctgtttgtggatgatacttataataacgatcagaccgctttgtatcgggaagttaaaaacctgtatgagcagggatacaacagcccgcttatgtacatggagctttgcgaagtcttaaacaacaacccgttgctgctgaagcatattacagatcttgaggttacaacgatccgatggggattgcgccaccagtatctgtcggacgaagtgatcgaggcgtttatccagcttgcggcatcattccgtcagtttgatgcgaagattttcgagatcatggatagcatttactccaagaaaaagagtgacgaggtgctgtcaagtatctgctcgatgctgatcagcgcaggaaaactggataacaagtaccatcggttctaccgggatgcagtggaacgcaacctgaaatttatcgggctgaatgagtgctttgtcaagagtatgaatttctccagatatgatttgataccgcagtcggtattgatgtatctgaattataagaatacactttccgaaaaagagcttgcgtacttgtatgcgaacgtaatttacaacaagtcccagcacatgaaggtgtaccacgaatatgcgacaacgatgcaggatttcatggagaatatgattatcagcggcaaggtcagcgatgatctgactgtgctttatgatgagttcttggagcctgagacggtcagtccgctttatgcgagcaagctgatcaacattatcttccgtcggaagcttgtctgctttaacaagggcgtgcgtgccgtgatcgtgacgcatcaggagttagaggaagtacagcgcgtaccgatcgtaaacggcgaagcatatgtggagattctgtcgaacacggcttccattatcttcgaggatagcgcggggaaccggtatgcgggatctattccgtatcgactggaacgtattgtagatgaaaatgcatatatggatatctgctgtaaatacagtccgcgggattaccgggtgctgctgcataactatgagcagcttggtgatttcacattcaagaaggcaatcgaggtcaatgctgcacgagatattgttaactgtgatgagatctcctatgattacaagcagcaggcatatctgaatattattgaatattaccatgagaatctggataacgaggtgcttacaaagtatctcgaaaaattggatatcgaatacttaaatcacgcaaatgcacgtgtgatgatcgcttacatggtcgatatgaacatgttcgacaaggcatttcaggcggtgaagctgtatggcttcgatgagatcgacagtgaagagctgtatcgtctggcggattatggtgtggaggacagcaatggcttcttaaatgaggatctgctttccatctgtatccatctgtacaaatccggtaaggtcaatgagcggattttggtatatatcatcaaccattataagggtgacttggaagaattggcaggtatttttaagacggtgcgtaaccgtgtcagagatatttccctgctggcagaaaatacattggcacagatgatgttcgcgatgggaaatgtcgagtacatctacgatatctttaccgcgtattatgcaggcagaaaccgtggactggtcgtaaaggcgttcctgcggtttgcatgctataactatctaatcaaagatgcacagattccaagtggtgtctttgactgtctgtatcaggagattcagaagggcaatatcgaggatgagatttcccgtatgtccatgctgcatcacttctcgaagctggatcgttatacgggcgagcagaagacgtggatcaaggatgcggttggcaagtttatggatgcaggcaagctgcttccgttctacaagagcttccagtcctttatcaagctgccacaggatgtcatgctcaagacctatctgatctacaagagcgagccgggcaaacaggtaacagtgaagtacgcatttgatactggttccagacagaatctgatctacaagacagagcttctggatgagatgattccgggcatgtatgtgaaggaatatgtcgtgttccacggcgagcgccttgtctatgaaatctcggatgataagcagggtacttcttatgtggtagagagtgaatcgctgaagtccaaagcgtttaaccgcaaagaccggaaccgctttgagattatcaacagcatgcttgtcaatcaggaaatgcgggaagataatgagctgttagagacattggatgtttacctgaatacggtacatctgtttgaagagaatttgagtatattgtaatatcgcggggaaacctgtggattgcaatgcatagaaatagatataagtacgaaaggaaaaagacatgtcagaggcgtattatataggcatggatctgtgttcggattccacgcagattagtttttataacgacatctcgcgcgagccggagacagtcaaccaattaaataacaaagaaacatatatgatgccaaacatccttttcttcggcttagagaccggagagtggtatgttggctccgaagcttccgaggcacgtttcaaggagcagggtatcgtgttggatgagctgtttcagaatgcgcgcagtgaggagactgttgaggtgcataatacgcgttacagttatcgcaagctgtttttaatgatgcttaaaatgcatgtcgattctttcctgtatcgttatgagggcgcgacggtaaagaagcttgtcattacgattccagaatataacaaggatctgttccgtgtactttcaacgttttacaaggagcttggtgtcgagaaggagcaggtggagatcacgagccatcttgacagtggtctgtattacatttttaatcaggatgaaagcctgcgcacaaacagtgtgggattgtttgattacaatacggatggcctgcattattacagaattgatatctcgcatggacacgaactgaacacgatcagtgtcacacatgaggactattctgagaatttcaatctggcagccttcggcggtgacaatatcctgatggatattacatttgcaaagattgtggcaaatgagacaaagaaaacatacatttcggccatttatctgaccggactcggattctccgagaaatggctgaacaaatcacgcgagcttctgacgcagggcagacgtgtatttgccggacagaatatctataccaagggtgcctgctacaaggcagtcggcggtgaatatggcgaattttataagaagtattttgtagagacaaaggagaatgtgatctttgatgtcggaatctcttcggaggacgaggaggatcggtttattccgatcgccttgggcggcagacagtggtacaacatccacggaaagatcagtattatattggatgatacagagtccctgactttggtataccggaaccggaagaccggagaagaagagcgggaagtcgtgaagctgcacggaatcccgaaacgtccgaacaagacgtctaagttctccgtggaggtggaatttgagaatccacatcatggcgcatttatcattaaggatgttggatttggaaaattattcccgaccacgaacaagatttatcgtaaggagtttgatgtttaatgtcaaaaattatcttatgtacaagaaaagaagcatcgcatccgttcatctttctgaatacgaaggtggagatcaacacctacgaggagctgtgcttttatatctacaataataccgtgctgatctcgaagtcttctctgtctgagaagctgtttgactggattcgggatgagctggatatgccggagcttgcagcgaagctggtagcactttcgaacaaggcgacatttgcacaggatctgctggttgaaattttaaatgccggggattactatacaccggacgagattgcaacttatgtggaagcatggcagaaatatcgtcggctgacatcaagtcagcgtaagaaattaaaggcagacagttatcttggctaccgcagatacatcaaggcggcatcgatttacgatgagattctggacaaccagcaggatatcacagacaaggtatttcttggaaatgtctatcacaaccgaggtgtggcagcagccaacaacatggatgtggaagatgcaaaaagctatttcatgaaagcgtatgaattaaatggcaacgaggagagtctgcgcagttacctgatcgtattttcggcagggaacgatgcgacgacactgaagcaggaaatgcggaagtttgacctcgatgaagataattttgagaatttgatgattgagatcggagattcgaatgaggatgtccgggagatgacaatcttctctatgttacaacgtgcggtatacaaccgtatgaataaggacatgatcgattacgacaagcgaatggatattatacttggacaattgaaggatgaattcagagagcaggcgatttga

SEQ ID NO: 562 - DNA, 5760 bp, unidentified
  source 1..5760: mol_type = unassigned DNA
atggcaaaacgagtaggaaccgcagagtttgaagcggaagtgctgaaagagaagcttccggtgatcgtagagttttattctgacagctgcatcccatgtaagcagttatcaccgattcttggcgggattgaggatgattacgaggatcaggtcaaggtagtcaaggtcaatgtgaatttcgatgcagaccttgccggggaatatcaggtaatggcatccccaacgatacttttcttcaaggatggcagggaagttgaccgtatccgcggattggtaaagcgtccggagctggaagataaggtcaagagtatactggaataaggtagaacagttaattacaaacaattatgaaactggacttaactgaatagagttgcacataattactaattctaaagcagaccattgaagcacgctggcacttaacgaacggcaaacttgtttgacgtgagtttagtaccattgcgtgatgaagtgagcgagagcgcgtctgcgtagaaatagtaattatgtgtaacgcattaaataagtatatgtttcataattgtttggaacaaaggaggataaataaatgacagttgtagtggcaggcgttaagaaggaagtagaagcaggaacaaccatcgcaaagctcatcgtagacgagaaggtggaaaatccggattatgtaacagttaccgtcaacgatgactttgttgacagcgacgcatttgacaagacagaactgaaggacggagatacggtagagttcctgtacttcatgggaggaggcgcattttaatggcatttacgaatgaacagatggaacgttacagccgtcatatcattctgcaggaagttggtgtaaaaggacagaagaaactgatgaacggcaaggttctgatcatcggtgccggaggtctcggtgcacctgcagcaatgtatctggcagcagccggcgttggtacgatcggtattgtcgatgccgatgaggttgacctttcaaatctgcagagacagatcattcatggaactgcagatgtaggcaaagcgaaggtaaaatccgcaaaagagacaatgaatgcgatgaacccggacgtcatagtcaatacataccgtgaatttgtaacctcagaaaatatcatggatctgatcaaggattacgatttcatcatcgatggaaccgataacttcccggcgaagttccttataaacgatgcctgtgttatggcgaagaagccattttcccatgcaggtatcatccgtttcaagggccagcttatgacatatgtgccgggagaaggtccttgctatcgttgtgtattcaagaatccaccaccaaaggatgcagttccaacctgtaagcaggctggtgtcatcggtgcgatgggcggtgtcatcggaagcttacaggcaatggaggcaatcaagtacctgatcggtgtcggtgatctgcttactggtaagcttctgaccttcgatgcattgaagatggaattccatacgatcaagcttccggataaccataagacatgtgcaatctgtggcgaccacccaacgattcacaagctgattgattatgaacaggtcgagtgcgacggaaagtaggtagagcaatgttagtcatgacaaaagcagattacgagaagattctggggcattgcaagaaggggctgccaaatgaatcctgtggattgatcggcggtgtcgttgaagatggaaagaggtacattaagaaggtgtatctgctcacgaatatcgatgcgagcaacgagcatttctcgatggatccgaaggagcaacttgccgcagtcaaggacatgcgagcaaatggataccagctgcttggcaacttccattctcatccggaatccccatcacgcccgtccgaggaggacaagcgtctggcatatgattccaaggtaaattatctgatcctctctttgatggatttagagaacccggtattgaatgcgttccatattgatgaggaaaaaaatgtgaccaaggaagaacttgtaatcgaataagattagttgagcggcaggaaggggattcctgccgtttctgcgtggtgagctgacaggatgtgggcgtagcgagcgggaaacgggctgaaaaacccacgagttgggttcgggagacagaaaagccggcagaaaccccagaaccggaaactaaatcgtagaagtggagcaggatgtgggcgtagcgagcgggaaaagggctgaaaaaaccacgacgtgggtttcggagatagaaaaccaagcagaagacccagaaccggaagcaagagcaatttctaaggttgattgaaagaagaatgtcaattataatatgtagtatgtatatgaataaaaacagttaacaggaagaagcacctatgatatgcatcagtatcacacataagaatttaacagcggcgaagcgggagtgctttgcctgcaatgatgaggaacagataaaactggcaggtgccgtggcgaagacatatccggaagccgggttggttttacttatgacatgtaatcgaagcgaaatctatatgagcggcacggacacggatttcgtatggctggaacagcagtttgcggatacaaagaaattcccggtcgaggcgttgaagggtgcggctatgcggtatgaaggaaaaagctgcctgacacatctgtgccgcgtagtctgtggactggattctgctgtgcttggagaggttgaaattataagacaggtcaagcaggcgtatcttgcggcgaaagagcgcgggcagaccgatgcggaaatgaatatggtatttcaaggggcactgcggcttgccaaggaagtggctgagacttcacagatgacgcatcttccggtatccgtcggaacacttgcatgtacggcggcgttggagtctggtgcgggaaaacatatcctcatcatcggagctgccgggcagatgggaagcatcgtgatgcgggatctgctcgatgcggatacgcaggtacagatcgtcgggacgagccggaagcataagcaggcattgcagaaaatcctctcacatgagcgggtgcaatgggtgcattacgaccaacggtatgaatatctaaactgggcggatgtgattattagtgtgacggacagtccgcattatacatttcttgcagataaggtagcggaagtacggaaggaaacgaaaccacagttgttcttagaccttgcgattccacgggatattgatgcagagatcggaagactttccagctgcgtcgtgaaagatctcgactatatcaagtcgcttgcgacggaaaataaccgaaagaaactttccgaggcaaagaagattgaattactgattgaagaacatgtggacgagatgcagaagctgcttgcatttcgtgcatttgtcgggacgaggaaggacatcacggagaagcttggcgagaaatccgcgatgtggcttttgtaccagttgaaagacgttctggatgcacaggacttaaatcacgtattaaaagggatagaagatggcgtattttccattcatgatacaactcgatgataaacaatgtctgatcgtaggcggcggtgcagttgcagcgcggaaggcggcacagatgtgtgagtttggcgcatgtgtaacggtggtagcaccggagatctgcgcggaactgctggctatcgcagatacggaacgaatagatgaaacagcaggcatagtagaaaatattgatggtaattgccagaaaaagccggaacgaatccgggtgtggaagcgggaagtcacagaggcagacatttccggcatggacgttgtaatcatggcgacagatgatgcggagcttaattcgcagtatgcggagctttgcagaagtaagcatatattggtaaatgtggtcgatgtgaagaaggattgtgatttctatttcccggcaatcatcaagcagggggaggtcgttgtttcggtgtctaccggaggcaacagtccgatgcttgcatcgaagatcaagaaggatatccggcagacacttcggacagactatggtcagatcgcggatgagcttggagctatccgggagaaaattctggcagaggagccggatgaacgggcaagaaaacgaagatttgcagcaattgtggaggcaaaaatgcaggaacagagaatccggatcgggacgcggggaagcagacttgcgcagattcagacagatatggtgatcgaacaattaaagaagcattacccggatgtgcggtttgagaaagtgatcgtgacgacaaagggtgacaagcagaaagaggcggcaatcagttcctttggaggcaaggcagtgtttgtagaagaaatcgaggaagctttgctggatggtacgatcgatttggcggtacacagcgcgaaggatatgccgaatccatgtaagaaggggcttggcattgcgggcgttctgccgcgtgcctgcgtgcaggatgtgctgatctatcgtgcggatacggatatccggtcgaagaatacatttaccgtgggaaccggaagcttgcgcagacgcagccagattaaggagatatacccacaggcagagtgcatggaacttcggggaaatgtcacgacgcgcatacagaaattgcgggatggcttatatgatgcgatcatccttgcggcggcgggaatcgaacggttaggtatcgagaaggaaccggatcttgtctatgaatacctcgatgtggatgcgatgcttccggcagccggacagggtattattgcgatggaagcgtgtgaggggactcttccgtatcatatggcagagacaatcagtgatgcggagacagagggctgtctgcgtgccgagcgtgcggttgtccgtgagatggaagcgggctgccatgagccaatcggtgtatatgcgacatggaaggatgacaagactatgcaggtgcgcgtgatgaatgcccggagtggaaaggtcaagcgggaggtgtgggaacgagaaaaggaagacgcaaatgatcttgaataatggggagaaagcatataatcgtgtcaaggaagagaggtgcggatctatgaaaataaaattcgacaacataactgcaaaaactgcgaaatactgtgcacttatatttacggtgctgttgcttatcggtctggttttttcatttctcgaaatccccggtacagaggtgttctatatcatggctgtttatacaggtgtgcttgtaggacttccgtgttatgttgtgcttttcgctgcaaagctgtattttgcccgtttgcgggcctacggctacgaaatcccggataataaaaaaatatatgggaataatctgaacaatcttccgaagacgcgtgaggcaggaagatcgctttttgcaaagcacagccggattgggatgtggatgtatttcgcatgctttgtcttgtttctggtggtggatgtgatgtatctgatcaaatggcattttatgaaggggcattttatgaaggatatctgtacatttctgttcaccgtgtgtctggttctggacagcgtctggcttattcttgcggtaattatgtggcggcagagaaatacagagaagtaccgggatgatgtggaatgtgacaaaatgcgcaaagagcgcctgaatcttgagaatattattgtatttgcaatcttctgggcgatcgtctgtgcagttgcatgtattcaggcggtgacgacaacgaaatatatggataaggtgcagagggagaatgcacaagtggctgcgtctgaattaaaaatggcggataatatggtggaattaggaaattatgaatcataa

SEQ ID NO: 563 - DNA, 13356 bp, unidentified
  source 1..13356: mol_type = unassigned DNA
atgtattcatttgatgaagtattaaactatgatccagaccttgctaaggctatggatgatgaacttggaagacagagaagccacatcgagcttatcgcttctgagaaccttgtaagtaaggcagttatggctgctatgggaagccctcttactaataagtatgcagaaggatatcctggaaagagatattacggcggttgtgagtatgtagatgttgttgagacacttgcaattgaaagagccaagaagctttttggctgtgaatatgcaaatgtacagccacattcaggagcacaggctaacttagctgtattctttgcacttgttaatcctggagatacagttatgggtatgagccttgactgtggtggacatttatcacatggttcaccagttaatatttctggaaaatactttaacatcgttccttatggtgttacagcagacggatttattgattatgatgaagtattaagaattgctaaggaatgcaagcctaagatgattattgcaggagcttctgcttatgcaagaacaatcgacttcaagaagttcagagaaatctgtgatgaagttggcgcattacttatggtagatatggcgcatattgcaggtcttgtagccggtggtgcacacccaagcccaattccatatgcagatgttacaacaacaacaacacataagacactccgtggaccaagaggaggtatgattcttgcttcagcagaggcagcagagaagttcaagcttaacaaggctgtattccctggaattcagggcggacctcttatgcatgttattgctggtaaggcagtgtgcttaaaggaagcgcttgacccaagctttaaggtatatgctgaaaatgttgttaagaatgcatcagcacttgctaacggacttatgaacagaggttttgatatcgtatctggtggtacagataaccatcttatgcttgttaacctcttaagcaagggaaagactggtaaggaagttgaaaagcttcttgatgcagctaatattacatgtaacaagaatacaattcctaatgacccagcttctccattcgtaacaagcggtatcagacttggtacagcagccgttacaacaagaggcttcaatgaggctgatatggatgttgttgcagaagcaattgctatgcttgttgatgatgtagatgccaaccaggctaaggcaatggaacttgttaagggacttacagataagtacccactttacgaataaagaaatttttagaaaatcaccttatgaattaaggaaaaaacgcatatttttattgttgcaatttcacgcacttgggactatagttagtgtcgaagtgcaaaggggcacgaaagtgaaaagctttcgtgcccctttctttttgagaagtggtggcatattgaagtccatatatctgaatgaagattgtatgaaattatgaaaagtaaaatttggaagtgaaaatatcagtcataggtgatataatcaacgatagtttaaatgaaaaggaattagaaattatgagacatttttcgagaacagaattaaaggcagctattaatatgcttaaggagtttactgcgaagggcaattttgcagttcttatgtatatgggggatactgataagcttgaggtatcacagactcttaattcggatatgagctgctttttattatatggaagcatccagccactcgcatttttctttgcagaaaatattcctatgactgcgggtgagttagaagagattattaacaaacagtcagcagtgtatgaagaagagatggacaattacagaaatgcactaaaggaaagcggtgcagataatggactgtttattactaaatatgaaagtatgattcatacatttattgcatatgatcctgaccagagtggtgacagagactgttatgcaccatttattgagggtgcattcaatgttgaaccgggtaagggacagtttgttaatgaagttatgagacttgaagtgtatgatgatgaatatgaggatgactgtgtaatccagaagaagcattttgtatatcttccatcagtaaaatttatgggagcattcaatatgcgaatgatgatgagtatggttgatgcacagtataactaacattttacaattcttaaatttatataatatgtttgaatcccggacttctgtatagtatattagaagtaactttaaagagtggaggggttgtatgaacaaaggacattttaaagacagtcaggttgttaagggaattacgattggtgcagtgctaattgtaatatatcttgcccttaacaatgtgactggaattcttgattctatatcatatcttgcaggacttgtaatgccatttataattggcgcagtcatcgcatttgtattcaatgtacctatgaaagcaattgaaaaaggacttaacaggctgtttgacaagcgttgtaagaagaagcatcccagacttataagagtgcttgcttatatgctaacactgattttgatactggctattattgcaggagtactttttgtggttgtgcctgaactggtgaacacaatagctgaccttatagggcaggtgccaacagcagttaataatcttatcaactggctgcaggtcaagctgtctgcatatcctgagtatgaggaaaagttaagcagcatatcaatcaactgggattctgttctttcaaatgttatgaatttcctttcaataggaactaaaggtattattaatggcggaattggtgcaataagcggatttttctcaggagtcactaatttctttattggatttgtcttttctgtgtatgtgctgtttcagaaagagaggcttacagcacaatgcaagaagcttatgtatgtgtgcttgcctgagaacagggcagataaaattattgaagtgttaagacttaccaacactacattctctaatttcctgtcaggacagtgtcttgaagcatgtattcttggaacgatgtttgttattacattgtctatattgagaatgccttatgcacttcttataggaattattattgcggttagtgcacttattccgattgttggtgcatttatcggatgtatagtcggtgtgattcttataatgatgacaagcccgttaaaggcacttatatttgtgggagtattccttatattacagcagattgaaggaaatcttatatatcctcatgttgtcggaagttcagttggactgccgggaatatgggtgcttgttgctgttacaatcggtggcaatctgtttggtataatgggtatgcttacttttattccaatcagctcagtgtgttatgcgctgcttcggacatatgtcaacaggaaagtggaagagaaggagattgataagggaaagtttaaggggtgatgccttccgggaatggaagtcaggcggctatgcagcttgttttcaaacacgcttgcgctcgttctacgacgcagcggtactaagctcgctgggattcgttggcgttaagccaactgtccaagcttactaagtgccggtgtcttcgcaacggtttgaaaacaagttgtatagtcgcctgacttcattctcacggaagacttttgtgccgtggattggcaggtggagtgtaatatgcggtggagctgtggtggcggattggacgctggagtggtgaagaggcatgtgaaagtccaaattgagtgagaaagtgtggaggattggaccttacaagcaagagaatgaggtaaaaggtccagaattgttgtgaaatctggaaagattggactttttgctgaataagctgcttgtagtgtccaatccgccttgtagtcaatgagttattggacattagcatatgagaaagcagagaaaaagtccaatcagccagattatcatgatatataattaatctggacaacatgatacctataggtagtcgaatatttgaaagtcttataggtcgaaaacacatgagattataatgatagttggaaaatcaacctataaagtcaagaaaatcagaagtgttataggaatattcagtaaaaaacagttttttatataagattgaataagaaaaactgtgaaatttacatataagtggtggattttttatgaattgataggaaatcataatgaattataaaagcaacatccccggcatgattaataatcatgccggggatactttttgttatattctttaattacttattgttcttcttctcgttctcaagcttcttcatagctcttaccttaagtgaaagaccgaagaggttgatgaatccgtcagcatcatgatgatcatacatatcacctgtcttgaatgatgcaattgactcattgtaaagtgaatatggagatgttgttccagccttgatgatgttacccttgtaaagtctgaacttaacttcacctgttacatattcctgagtcttctcaacgaatgcctgaagtgcttcacgaagaggtgtctcccactttccttcgtaaacaacctgtgcaaacttgtttccaacatccatcttgaatgttgttgtatctctgtcgagaactaattcctcaagctgctgatgagcttcgtaaagaattgttccaccaggagtctcatatacaccacgggacttcatacctacaacacggttctcaacgatatcaatgataccgataccatgcttggcaccaagtctgttaagctctctgataatatcagaaaccttcatagccttgccattaactgactttggaacacctttttcaaatgtcatagtaacatattctggttcatccggagcttcctcaggagtgcatccaagaactaataaatgcttgtagttaggctcgttagctggatcttcaagctcaagaccttcatggctgatatgccagatgttacggtcacggctgtagctgcagtctgtgctgaatggaagatgaataccatgctgtctgcagtattcaatctcatcctcacgagactgaagcttccagttagaatctctccaaggagcgataatcttgatatctggagctaaagccttgattgtaagttcgaatctgatctggtcattacccttaccagtagcaccgtggcagatggcaacagcaccttccttacgggcaatctcaacaagtctcttagcgataagaggtcttgccattgaagtaccaagtaaatatttattttcataaacagcgtgtgcctgaacacatggaacgatgtagttgtcgcagaattcatcagtgatatcttctatatataacttagcagcaccacatgagagagctctctgctcaagtccgtccaactcctcttcctgaccacagtctgcacatacgcagacaacatcatagttgtatgtttcctttaaccaagggatgatggcagttgtgtcaagtccgccagaataagcaagaataactttttctttcattatatattcctccgtatattattaagtttacatagtaaaacacatatgctatgcacctgcagattataataaactactttatttaaaaatgcaacaacaaattatgcatattatacattgatatacaacgaaaatgtataaatataaaatttctttaaaatatcctttacataagaaaaaaagttgctataatgtaggttatcaatttacattttgcgttattttatgcataaatgttgaatatatgcattttgcttcgcaaaacaaggaggagttatgattaaagtaggcattatcggtgcgacaggttacgcaggtaacgagcttgtcagattattattaggacataaggatgcagagattgtatggctcggttcgagaagttacatagatcagaattattcagatgtatatagaaacatgtttaagcttgtagatgcaaaatgtatggacgacaatatggagcagcttgctaacgaggttgatgttatatttacagcaacaccacagggcttatgtgcgtcacttgttaatgatgagatactttcaaagactaagattattgatttgagtgcagatttcagacttaaggatgttaatgtatatgagcagtggtataagcttgagcataaagcaccacagtatattgatgaagctgtttatggcttatgtgagattaacagagataaggtaagcaaagacacaagaatcattgctaacccaggctgttatacaacaacatcaattcttacactttacccaatggttaaggaaggaataatcaatccggatacaattataattgatgctaagagtggaacttcaggtgcaggacgtggcgctaaggttgccaatcttttctgcgaagttaatgaaagcatgaaggcatatggcgtaggaactcacagacatacacctgagattgaggaacagttaggttatgcatgtggaagagatgatttaaagcttatcttcacaccacatttggttccaatgaacagaggaattcttgtaacagcatacgccaaccttgccaaagatgttacatatgaagatgttaaggcagcatatgacaagtactatgataaggaatatttcgtaagagtacttcctaaagatgtatgccctgaaacacgctgggttgagggaagcaactttgttgatataggatttaagattgagccaagaactaacagacttataatgatgggtgcgttagataatcttgttaagggtgcagcaggtcaggcagtacagaatatgaaccttctcttcggacttccagagaatgagggattacagcttgcaccaatgtttccataataaatgtagcgtaaattcagaatttacacgacgaaatatgcacaatgacagagtatatgtgatggtacaataggaggatgttatgaatataattaaaggcggtgttacagcagctaaaggattcaaggctgccggatgtgaagcacagattaaatataagaacggaaagaaagatatggcacttgtatacagtgagaagccatgtgttacagcaggaacatttacaactaacaaagtatttgcagctcctgttaaatgggacagaaacattgtatataatgaagactttgcacaggctgtagttgtaaacagcggtgttgccaacgcatgtacaggcgttgaaggagataacgcatgtgcagaagaagcaaaggcagttgcaaaggttcttaatgtaccggagaatgcagtacttatcggttcaacaggtgttatcggaatgcagcttcctgttgacagaatatgtgcaggaattgaaaaccttgctccaatgcttgatgattcattagaagcaggaacacaggcagcagaggcaattatgactacagatacaagaagcaagcaggttgctgtagaagtagaagttgcaggtactaaggtaacaatcggtggtatgtgcaagggcgcaggaatgattcatcctaacatggcaacaatgctctgctacataacaacagactgtgatatcgacaaggcacttcttcagaagatgacaagtgcaattgttgatgattcatttaacatgatatcagttgatggagatacatcaactaatgatacagctcttgttcttgctaacggaatggctggcaacaagaagattacagaagagggtgctgattataatgctttctatgaaggcttaagctatgtatttacagagctttccaagatgattgcaggtgacggcgaaggctgcacatgtcttttcgaggttcaggtaaagggtgcaacaactaaggcagaagccaagacactcgctaagtcaattgttacatcaagtcttaccaaggcagcaatattcggacatgacgctaactggggaagaattctctgtgcaatgggatattctggtgctgactttgaccctgaaaaggttgatatattctttaagagtgaagcaggtgagcttcagattgttaaagatggaactgctacagattacagcgaggagaaagcaacggaaatactttcacagaatcctgtaattgctattgcggatgttaagcagggcgatgcaagcgctacagcatggggctgtgaccttacatttgattatgtcaagataaatgctgattacagaagctaatctgacacagcattttaaagcaaatagatatctgaataaatatgaaatggagattattatgagcgcaaaagatatgacagaggaacttatgaaggcacaggtgcttgttgaggcacttccttatatccagaaatttaacagaaagataattgtagttaagtacggcggaagtgccatggtagatgaagaacttaagagaaaagttattcaggacgtagttcttcttaaacttgttggttttaagccaatcatcgttcacggcggtggcaaggaaatcagcaaatgggttgaaaagtcaggcatgacacctgaattcaagaatggtttaagagttacagacgagccaacaatggagattgccgagatggttcttaacaaggttaataagagtcttgtgtcaatgattgagcagcttggagttaaggcatgtggtatcagtggtaaggatggcggcatgttaaaggttgagaagaagtattctaagggtgaggatataggatatgttggtgaagtgacagatgttgacacaacacttcttgattcattgcttaaggacgatttcttaccggtaatatgtcctatcggatatgatgatgatttccatgcatataatattaatgctgatgatgcagcatgtgccatcgcaagagcagtcagtgctgaaaagcttgcattcttaacagatattgaaggtgtgtataaggattttgatgataaggattcactaatatctgagctttctacctcagaggcgagaacgcttttagagagtggaacaattggcggcggtatgcttcctaagcttaataactgtatagatgctattgagcatggtgtatcaagagtacatattcttgatggaagaattccacactgccttcttcttgaaatatttactaacaagggtgttggtacagctattctttcagatgatgcagaaaaattctttgattcagataaataattgcgaaccgtaagcgttgaggttataatattatattggctcatgtgaaaatgtgtgctcataagaataggaaagtgagagtaatcatgaatacacagcagattatagaaacagcagaagagaagctgattcatacatacaaccgttaccagatagtacttgataagggtgacggagtaagactttacgatacagatggtaaagaatatcttgattttggagcaggtatagcagtatttgcacttggttataacaataaagaatataacgatgcattaaaggcacagattgataagcttatacacacatctaattatttctataatgaaccggctgtagaggctgcaactgcacttacaaaggcttcaggaatggacagagtattctttactaacagtggaacagaggctattgaaggtgcagttaagcttgcaaagaaatattattatgtcaagaacggaaaggctgatgcagagattattgcaatgcagcattcattccatggaagaagtatgggagcacttgcagtaactggtaataagcattatcaggaagcattcggacctatgataccgggaattaagtttgcacagtataacgaccttgacagtgtaaaggaacttgttaatgacaaaacttgtgctataatatttgagacagtacagggtgaaggaggaatttatcctgctactaaagaatttattgaaggtgtaagaaagttatgcgatgagaagggaatccttcttatacttgatgagattcagtgcggaatgggaagaacaggaagtatgtttgcattccagcagtatggcgttaagcctgatatccttacagttgccaaggctcttggctgtggagttcctgtaggtgcatttgcagcgacagaggaagttgcgaaagcattagttccaggagaccatggaacaacatacggtggtaatccacttgcatgtgcagcagcaaccaaggtgttcgaactttttgagaagcaacatgtattagataatgtcaaggaagtatctgcttactttgaagaaaagcttgatgagcttgttgagacaatagatgttgttgtcgagagacgaggaatgggacttatgcagggacttgagttatcagttaatcctaaggacgtaattgccaaagcacttgataacggacttattctgttctcagcaggaactaatgttataagatttgttccaccacttgtaatcactaaggcagatgtagatgaatgcatagctaagcttaagaaatccttctagaatcaggagtttactttatgaaattaagaagatttatcagtatgatgctgattgttaccatgctgacagtctttgcaggctgtggtaataaagatgacaggacacaggctgcgaagaagcttaatcttagtggacctattacagttaatgtctggtataatgacagcgcatatgagtcttatcttgaattcgttgccagacaatttaagaaatctaatgaactggtaactattaatcctgtatatattgaggctgattcatatattacttatatatatgacgaatcggtcagaaacgacaatgcgtgtgatatatattttctgacatctgaagagatggagaaggcttatctttcaggtcttacctctgagaatgatatgtatcctgaagtctataatgagaatgtgtatggtaaggctgcaatgactgcatgttcgtatggtggtaagttatatggttacccagtgtcgttcaacacttcatttcttgtatataataagaaatatgcagaagcagttgatactatagaccagattcgtaatataagtgataattatcagattacagatgagaatcaggatgtttcaatggtgtttgaatgggatcctgattcaatgttccttaattatgcagcagcaggagcctatattaatataggcggagttaatgcagagaacagggctgaggtatctcttaatgaggaaaagattaagaaggttcttactaagtacgctcagttaaaagatgcatttggtattgacagaaatacagtaagtcttaaagaatgtgcggatctgttttctactggaaatatgctctatacggtgctagatgcagacagtcttgcagagattaatgttacagatgtagattatggaatatgtgagtatccttcaatgggagatgaccttgattctaaggcaatgtctgttactacgatggcagtagttaatccgtacactaagaatgtagatgcatccaaggctgttgcaagagcaatttcttatgattatgcagattatcttgggaacatggctaagaaaagctgtgcaagggcggatttaaaggttaagagagcagaaagctaccagaagttacaccagatttattctgactctgttgtaaaagctaaatatatcggagtaggagaagtgtatatgagatatgagattatgcttcatcaggtatatgatggtggaaatgttgatacagcttacagtacatttgcaacaacaatagaaaaaacaactaaaaataataatgaaaacagtacgcagagtactaaataacattatgaataaatatcctgttattaactaataattatcctatgcagattaatgtggaggttagttaatggcaggatttttgattgcaataatatcaggtgcacttatgagtttacagggcgcatttaatacaaatgttacaaaagcaagcagtgtgtgggttacggcaatgtttgtgcagttgacagcactggcgacttgtgcgattatgtgggtaattgacggaagacctgatatcatgaagctgtttaaggttgataacaagattacacttcttggaggtgtgataggtgcatttataacatttacagttataaaaagtataagtggtcttggaattgctaaagcggaggttacgattgtagttgcgcagataattgtttcgtatctgctgggacttttcgggctgtttggaagtgagaagactacattttcatggattaagctcgtgtcgcttcttattacggttgcaggagtatgtatgttttattttcttggtaatccgtcaacggattaatatattatgaataattatgatacatgtcagaaaaatctggcaggaaggaacagaatggaagatttattcagcgtatgcggaaagatacgattaagaaaaggtgaaggaagaacattaaaggcaggcggtgcctgggtatatgataacgaaattgaatggatgtctgacggaataattgatggacatcttgttgaggtgcttgattttgatgattatttcatgggaatcggatttattaacagaaaatccaagattacagtaagaatgctcgcaagacacactgatgttgttgatgaggcatttattgaggagagagtaagggctgcggttgaatacagatttgacacagtagatacctctgcctgccgtcttatatttggggaggcagattttctgccggggcttgttatagataagtactcagatgtgcttgttgtggaatcgcttgctttaggtattgacagatttaagtcgcttattgtcgaaaaagtgaaggaaatccttcatgaaaaaggcattgatatccgtggagtatatgaaagaagcgatgccaaagtccgtactcttgaaggaatggagagagtaaagggctttattggtgatgaatttgacactaatgttgagatagttgagaatggtgtccactacatgatagatgttgtgaatggacagaaaaccgggttctttcttgatcagaagtacaacagacttgcaatgcagaagctttgcaaggacaagagggtattagactgttttacccatatgggtacatttgcattaaatgcaggaattgcaggtgctagggaagttacaggacttgatatatctgaatatgctgttgaacaggcgagagccaatgcaaagcttaacggacttgaggatacagtacattttaaatgtgcaaatgtattggatgagctgccaaagcttaacgaagcaggtgagaaatatgatgttgtaatacttgacccgccggcatttaccaaatcgagggaagctacaaagaacgcaattaagggctacagggaaatcaatatgaagggacttaaacttgtcaaagacggtggctaccttgcaagctgttcatgctcacacttcatgacacaggagcttcttaccaagactattaaggaagccgctaaagctgtacataaaagactccgtcaggtcgagttcaggacacagtcacctgaccacccaatactgtgggaggcgcaggagagctattatctgaaattctacatcttccaggttgtggatgaaaaatga

SEQ ID NO: 564 - DNA, 5990 bp, unidentified
  source 1..5990: mol_type = unassigned DNA
atgagcagttataagtatgatccgaagtcattaaaggcagaagaatttatcaatcatgaggagattctggaatctcttgattatgcgaaaaagaacaaagataatctttctttgatccgcgagattcttgagaaagcgaagaaggcaaagggaatttcccacaaagaggcagccgttttgatggagtgcgatgatccggagatcaaccgtgagatcagagagctagccatggagatcaaggagaagttttacgggcatcgtatcgttatgtttgcaccgctgtatctctccaattactgtgtgaatggatgcacttattgtccatatcatcacaagaataaacatattcctcgaatcaagctgacacaggatcagatccgtgatgaggtcattgccctgcaggatatgggtcataagcgcctggcgatcgaggcaggcgaggatccggtcaacaatccgcttgagtatattctggaaagtatcgacacgatctacagcatcaagcataagaatggtgcgatccgccgtgtcaatgtcaatattgcagcaacaactgtggagaattatacccgcctgaagaatgccggaatcggtacttatattctgttccaggagacctacaataaagaatcctatgagcagctacatccaaccggaccaaagcatgattatgcatatcataccgaggcaatggatcgtgcgatggagggcggcatcgatgatgttggtcttggcgttttgtttgggctggagggctaccgctatgagcttgttggtatcctgatgcatgcagagcatctggaggcagcacagggcgttggaccacacacgatcagtgtaccgaggatctgcccggcagacgatattgataccggtgatttcagcaacgccgtaccggatgagatcttcgagaagatcgttgccgtgatccgtatcgcggttccgtataccggaatgattatttctaccagagagtcccagaagacaagagaacatgtgctgcagcttggtatttcccagattagcggcggctcccgtaccagcgtgggtggttacaccgagccggtgcgtgatgacagctctgcacagtttgatgtcagcgatacccgtacacttgatgaggttgtcaactggctgatgaagatgggcttcattccaagtttctgtaccgcatgctaccgcgcaggaagaacaggagaccgttttatgtcacttcttaagtccggtcagattgtaaactgctgccagccgaacgccctcatgacattgaaggaatatctggaggattatgcatcaccggagacgaaggagatcggtgaatcgctgatcgccaaggagatccggaaggtgccaaatgagaaggtcagagaaagagccatccagtatcttgaggagttaaaggaaggaaagagagatttccgtttctagaacatagaaatcaatgtcctgaaaatgggacagacaaaatgttatttgaaaaaataatattaagaaacaataatatagaatgcaataaaaagactgctgctttacgaatagaaatcgtgaagcggcagtctttgttttccatgaaatcctcgtttctctgaaaagacaacgagaatttcattgttgaaaataaattatatcattagttaaaaattaaaactctatctctttcagataacgtgctacggcatcctgccaggttggcagtggagtaaagccgtttgcggtgagctttgatctgtccagacggctgttgaatggtctggctgctttggaaacaccgtactcagcagttgtgacaggagtgacggtgacgtgtgactcgtcatattccgtgtgtcccatggctgctgcctggcggaagatctcctttgtgaaatcataccagctgatatagccgccttcattggttgcatggtaatatccatacttgtccgtctcgatcatgtcaacaagaagtcttgcaagatcgaaggtataagtcggcgtaccgatctggtcatttacaacagtcagcttatcatgtgtctttccgacattgagcatggtacggataaagttctttccgttggtaccgaatacccatgcaatacgcacgataaaatacttgtccaatatttcggacacagcaagctcgccgtcgagcttggatgcaccgtatacatttaacggcttgtaatccttgcagtccggatcccacggtgtggttccctgaccgtcaaatacatagtcggtactgatatacatcatcttgcagtcaagatccttgcagacagcggcgatgttctccgtgccggttgcgttgacgttatagaccttatctttgttggcatcgtcctcagcggcatccacggcagtccatgcggcacagtggatgacagcatccgggttgatctttaaaagcgtttcagcgacagaggcacggtttgtgatatccatggatacataggctgcttttgttacataggtttcgtctgcaatgccgttgtattccggagcaaggtcacttccgatgccctcatgtcctctggacgcaagctcattcatgacatcatgtcctaattgtccggcgacgccggttactaatattttcataaaacactgttcctctttccgggtatcattctatggttatggattagcggttaccgtacatcttctcgtagtaattctggtactcaccggagatgattgtctcccaccactccttgttgtcgagataccactgaatggtcttcttgataccgtcagcaaacttcgtctcaggaagccagccaagctcgttgtggatcttggtcggatcgatcgcataacgcatatcgtgacccttacggtcggatacatatgtgatcaggctttccggcttgccaagctccttgcagatgatcttaacgatatcgatgttggtcatctcgttgtgaccaccgatgttgtaaacctcgccgacacgtcccttgtggatgatcagatcgatcgccttgcagtgatcctcgacgtacagccagtcacgaacgttttcaccggtaccgtatacaggaagcggcttgtcattcagtgcgttggcgatcataagaggaatcagcttctcaggaaagtgatatggtccgtagttgtttgagcagcggctgatcgttacaggcagaccgtaggttctgtgatatgccagtaccagaagatcagcgccggccttggatgaactgtaagggctgcttgtatggatcggagtttcctctgtgaagaacaggtccggtctgtcgagtggaagatcaccgtaaacctcatcggtagatacctgatgataacgggtaatgccatatttacggcatgcatccatcaatacggcagtacccattatatttgtctgaaggaatacctccggtgtctcaatggaacggtcaacgtggctttctgcagcgaagttgacaacgatgtccggatgctcctcctcgaataatttgtaaacagcctcgcggtctgtgatatcttccttaacaaaacggaaattcggattgtccataacaggagccagagtagagaggtttccggcataagtcaggcagtccagacagacgatacggtagtccgggtacttgttcagcatgtgaaatacaaagttacttccaataaatccggcaccgccggttacgataatagtcataatttttctccttaatctgtaatataaattgttattcggtgtctggcatcgcaaaacattaattagtgaagaacatccatgtacttgccgttcagaacgtccatcagatactgaccgtactggttcttcttgagcggctcatatgccttcagcacatcctcacgggtgatccagccgtttaagtaagcaatctcctccagacatgcgatcttgcggtgctggtgagactcgatggtctttacgaagttggttgcctcgacaaggctctcatgtgttccggtatccagccaggtaaagccctgtccgagaagttctacgttcagctcgccgttttccagatagacgcggttcagatcggtgatctcaagctcgcctcgtggacttggctttaactccttcgcatatttgacaacgcggttgtcatagaaataaagaccggttacacagtaattgctctttggcttctccggtttctcttcgatggaaacagcctttccgtcctgatcgaactcaacgataccgaaacgctccggatcatcgacgtaataaccgaatacggtagctccctttccggtctctgcattctcgacagcggctttcagccgttttttcagtccgtggccggcgaagatgttgtcaccgagtaccatggcaacggtgtcgtttccgatgaattcctcgccaatgataaatgcctgtgccagtccgtccgggcttggctgaacagcgtaggtcagatcgataccgaaatgatgaccgtctccgagcaactctttaaaacgaggtgtgtcctgtggtgttgagatgatcagtatctcgcggatccctgcgttcatcagtacggaaagcggatagtagatcatcggcttgtcgtagattggcagaagctgttttgatgtgaccattgttaatggataaagtcttgtgccggaaccgccggctaagataatacctttcataaggaatctcctttctttgatctgtttgtgtaagtcccaatagaagtatgttcatttttcagtttctgtacacagtataaaaggtaacgtaacgtcatcttcaagctttttttgtaaaattgtcactttgctgtaaatccgataatgaaaatgttggtttattgtgaaaaatgaatacgtttccgggcagtttcgcctgtctatgagggacggcacaggaaaattccggcgtccttcgtgatcgtaaagccgtccttcgctgccttttggacgaaatgacggaagtccttatagcggtttaacagatactggttctgattgccatggcaggataaaatataatcgatcagcggttcgggttccttcagataaatactgtctacataacgggacagagttacctgacggaaatgcggctgcaaaatagaggctccgttttccagaccgaagcggtcataaagattgtctgctgcaagctggatatgcggatcaaaatcctgcaccagtttactgatctccttcatgtgacgggaaccgtaggtgctgcagatgaagcagccgtcctttttaagaacacggcggatctcactgcagacctgcggaatgtcatcgcagtagaaaaggacatggttggcaaagatcagatcgaaggaatgatcctcgcagggaatattcgcacagtcgatcgtccggtaggagaaacgggaatcctcagcaccgatggtacgacggacatcacgcagcataccctcggatatgtcggaaagcagaatggagatctgttccggaagctgtgcaagattctctgtccagagtgcgccattgccgcaaccgacctcaaggatatgcatgcccggacggatgtctgcctgctcatagatccagggaaaccagccctgcttattgacagaatacttctgatgaagattgatccgtgcagtgatgttggtggaatcctgatactgccgtttcaggcttgtctccataccggtcaggtggatcaggcgcagcatctggctccagtccagctcgtgatccttttctatggcatcggcggtatcacggatcgccgtctccacaagctgcatctgttcgatgcgatcctggatcagcttgtgctgctgctcgagagaatttttcatcatatgatagtcggcagtatcgaccgtcatctcgcggatatcgtccagcgagaaaccaagatattttaaaagaaggatctgctgcagtcttgccagatcatggtcggtatagaaacgggcaccattctcattcacataggaaggcttcaggatattctgcttatcgtagtaccggatcgtgcgtacagagacgccggcaagccgggcaaactgtccggaagagtagtagccgtctttcttcat

SEQ ID NO: 565 - DNA, 6369 bp, unidentified
  source 1..6369: mol_type = unassigned DNA
ttatatacccttgtcaaccgaaaacgccttgttttcaccttttgtacacaaagcgtcagccctgtattccgtaggtgacacaccctttgccttgtggaatattcttgaaaaataaaggctgtcattataccctaccgaccttgccacagccgacacagaaagctcagtttcttccagcaaacggcaggcggcgttcacacggaaatcagttatatactgtgcaggagaaagcccctcgtattccatgaaagctcgatatagcgtggcacggctcacgccaacgaaatcggtggcattctcgacccctattccaagggtgtagttgtgtgcaatgtagtttttcgcctttgtgacatatccctttgcggtgctcccagaacggttttgacttcccgagcgttccataagaatgcccagtgtgatgtaaagctgacctgtcattttcacaaggtctgagcttctgtttccgctaagacgataaatgcgttcaagactgtctttaagctcgcttccaaagtctgcggagataacgggacactctcttgtgaagcctgcacgatcaaggataaattcagcgtcagagccgttgaaacctgcccagtagtattcccatgggtcgttcttgtcggcagtgtaggttataacagtgtaggggtaaatgagaaaagtgtcccctgcgctaaggtgatactctccctgcggtgttttgtatacgcccttgccacttatgatgtggtggataagataatggtcacgaacaccgcttccccaactgtgaagcccctgacatttttcatagcccacgttgtatactgacagcgaaagtgcatccgtctggtctgatttaaaggaatggcggtctgtattcattctgtgtgttcctttctgtgagatggtctgttatagatatgatagcatatttttattctctttgcaacaaaaatccatgtgtttgaaacaaaaatggtattgcaaaaacgtgaaaatatggtataatgtaagtgtaagaaaaaacttgacatatttgggaggtaaagaatatggcaaaaatactcgttacaggcggagcaggatttatcggaagccacacctgcgttgagcttcttgaagcaggctatgaagtagttatagttgataacttttcaaactcaaagccggaggctcttaacagaataaagaagataacaggcaaggactttgctttttatgaggcagatcttcttgaccttgcggcgctcgaaaagatatttgaagaaaacaagatagacgctgttatacattttgcaggtcttaaagcggttggcgaatctgttcagaagcctgttgaatattaccataacaacatcacaggcactctcatgcttatcaaggcaatgagaaaatacggctgtaagaagatagttttctcatcttccgcaacagtttacggccctgtaaacaaagctccttacacggaggatatgcctacatcagcaacaaacccttatggctatacaaaggtaatgatagagcagatactgagagatgtttatgtttccgacaacgattggtcagtttcacttctgagatacttcaaccctatcggcgcacataagagcggccttatcggcgaagaccctaacggtataccaaacaatctgcttccttacatttgtcaggtagcagtaggaaagcttgaaaagctcggtgtgtttggtgacgattacgatacccctgacggaacaggtgtaagagattatatccacgttgttgaccttgctaagggtcacctttgcgcagtcaagtatgtaatggaaaacaagggtgttgaagccgtaaacctcggcacaggaaaaggctcaagcgtttatgatgttcttcacagctttgaaaaagcctgcggaaagaagctcccatatgtagtaaagccaagacgtgcaggcgacctcgcaacctgctatgctgatacagcaaaggcaaagaaggtctttggctgggaagcacaatatggtcttgatgaaatgacagcagatagctggaacttcattaagaataatcctaacggactttaatacataagcatagaacataataattttcctaggcagggacacacaaatgtgtgtccctgttttttatgccctttttccattcatgcaataatgcgacaaaaaaatcccacagtaagtgataatatattttcagcggataaaacgaaaaaatgaaaggaatgataaagcatgaatgtggagataaaaaactatccgtcagccagaactcttgtggcagagatatgcggcgatatcgaccaccatacagcaaaatatttcaggggagagatagataaagccattagaagccataaccctcttacccttatcctcgactattctcaggtgacttttatggatagctcaggcatcggacttgttatgggcagatacaggataatgtcagaaatgggtggcgaggtgatagtggcgtcgcctcctgcttatatccgaaaggtcttgcagcttgcaggtatgcacagactcacaaagatagtcacggatattgccccgtatatacaagagaagaaagcagctcaggaacagaatgaaagccccgatgacaaaacaaaggagagtgataaaattgaaacgaaaaccccttaatgaaatgaaagtcagttttcccagctattctgaaaatgagcgctttgctagagttgcagtcagcggtttccttactcagcttgaccctcagatcgacgagcttgcagatgtcaagaccgcagtgtcagagggagtcacaaacgccattgtccacggataccgaaacaccctaggggagatattcatgcagataaggatattcgagaacagacacgtctacataaaaataagggataagggctgcggtatcgctgatatagagcaggctatgcagccgcttttcaccactgcgcctgaggaggaaagagcaggccttggctttgcggtcatggaaagctttatggataaagtgaaggtgcgcagcaagcttggagaaggaactacccttatccttgaaaaaaccttgaaagaaagagtataaaatgagcagcatagtcgagacccctcttgcagaagaaaatctggggcttgttcacctgtgcgcaaaccgcttccgcaaccgtggcatagagtatgacgacctctacggtgcaggctgtataggtcttgtaaaagctgcgaaagcctttgacagcgaccgtggtgtgaaattctccacctatgcagtgccagtgatattaggggagataaaaaggcttttccgtgacggtggcacgataaaagtgtcacggagcataaaagagctttccatgcgccttgtaagagagcgtgagcgattttccatacagcaggggagagaacctacagtaagcgagctttgtgagctgtcaggagaaagcgaagaagccgttactctagccatgaacgtcgccctgccccctgttagtcttactgaaagctcagatgaagacgaccgccacggacaaatagatatccctgttgatgctcctgacatagaaattgctgacaggctctctctccgtcaggtcatagcttcccttgaagcggaggatagaaagcttatatacctgagatattttcagaataaaactcagatggaaacggcaaaacaacttggtatgtcgcaggtgcaggtgtcaagacgagaaaaaaagctgctcactttaatgcgtgaacagcttaaataatatcattacagtgggcggcttttggtcgcccattttttacaaataagatctgagtatctcgatagtttcttcatgtgagcaaacagcgtcagaatctataaagtgctgaaaataatcccagaaagcctgaacaaggctcgtttcgcttatcttcaaataagaaaaatcagagaagcagttgtttctggcaatgatgttaagacttgtgttgtcagaaatgttgatacaaagatttttcgacaccgcaaaatagtcgttctttattatcctgtagtctgccatgccgttttcacaaagcgatatcattatctggagcattatcttgcgttctgcaagagtgggaaaagtatatgaatttctcggaagctcaaaaatctctcccgtcgtcataaactctgcaagacccttttcactgaacagatttacaaatttgtgttcagaaagagccttcttgcccatggtgagctttgcttttacaaatttctttgcgtcagctggcaaaagtgcatgggcgttgtatatatcctctgtaagacaaagcatggtgcatggctgaaaatctacgccgatgaaatttgcgttgtcatcgtaccaaaagtaaacatattccaaaatatccacggcgtggtcgagaagctttgcacattttgtcttgaacttttcaaactgccgcatataaaattctaccataggcttagatctgtatataacgccctcgcaataatcgctgtctgttctgatcagaaaattattcgttatcattatgtttggcatgatgttcgtggagttgaaatatgccgacgcaccctcataataataaaaagcctcatatttttcatgcttttgtgcaaggtgacatatgaacggaaaaatatccagattgtattttgcggtgtttttttcacctgaggtgttgtcaaagaagaacagatggtttatggtagactcgctgccttctgcggcaatggacagcagattggtaagaaactctgttggctgagcgatgacctgaatgtcagaaccgttatgaacatcgctgcatataagcacctgcaggttttttctaagctcacgtttgtcggtgtagatggatatctcaggcacagagtcaatatcaacttctgtcttgaaagtcagagcgtcaggctcttccatgtttgtgtttgccatatcgtgtattatctttgacacctgcttgcggcgattgtagacatcttcccccatctcagaaatgttataaagctccatgagcctgcttttatcctctgtggaaagcatgagctgcaagcttatattttctacaaaatctacgcttggcactttcctttcccctttgagtatcttatgaagatatgttctgtcgataccacatttttcggcaagagcttttatagtaatatcttttttctttatgtattctctgagaagttccgaaaattgtgacattggcatcatatcctttctgtagaaaacaggcatttaaagtatatttaaagtatatttttacataccgatacctatattatatcctatttacgcacaattgtcaacctttgataattttatcttattaaggcaaaaaacgtatatttttataaacagctgcaaaaaatacaagcgtaaaatggaatactttaaaatttggaggagttttcatgaaaataatattctatgacgcaaagcagtatgatatagattcatttgaaaagcagcgaaaaaactatcccgatatagaaagcgtttaccttgaagccgacttgacggaagacacagcaaggcttgccgagggctgtgaaggcgtgtgtgcctttgtaagctcaacgataacaggctcagtgcttagacggctccatgaacacggtgtaaagcttcttcttatgcgatgtgcaggctataataatgttgatataaaagccgccgataaatacggcataacagtgcttagagtgcctgggtattctccggaagccgtggcagaacacgccatggcgcttgcgcttgcagtaacaagaagaatacacaagggctatataaaggtaagagagaacaatttcagcctgaatggtcttatgggacttgatttccatggcaagaccgctggtataataggcacaggcaggataggtgcggcaatgtgcaggatatgccacggctttggtatgcgtgttatagcttatgacgtttatcagaaccccgaccttgacttcgtgaaatattatccccttagcgaagtcctgcgggaaagcgaccttatctcgctccattgccccctgacagaatcaagctatcatcttatcaatactgaaactatctcccttatgaaagagaatgttgtttttgtaaatacctcccgaggtgcgcttgtgaataccgaagaccttataaaaggtatcagaagcagaaaattccacggagtgggtcttgatgtttatgaggaagaaacggagaacgtctttgaaaaccgacaggaggatatcctagaaagctccgtgaccgcaaggcttctgtcttttcctaacgttatcgtcacctctcatcagggctttttcaccgaagaagccctagccgccataagccgcacaacgcttgagaatgcttgtgcttttgagcgtggcaggataataaaagaaaatcaggtcaaatag

SEQ ID NO: 566 - DNA, 11742 bp, unidentified
  source 1..11742: mol_type = unassigned DNA
atgatattgactgccgataattgcgaaaaatttatcagcacaatagaaagccttgacggacttgatccttttgcctgccgcataatttcgctttgtacaagttacaatccgcatcttccgtttgtggattattggactgtttttgatgacaaaagcaacactgcaacgggagcaatcgcacgaaacggcacggattttattctttttctgaccgataaaacggatatagacgaagtatcgacttttatgcgtgttgcaggcgcagcctcggtgatttgcagtaataaatacaatctcgatttattcggatacgaaaaatcgcacggccctattcttgtgcgcactgaagagattagcgagaatgacagccttataattgatactcctaagataaaagaggcgtatgaacttattgcaaaggcggcggacaaatattttacaccgccaaagtttgaggacttttatgtggatataaaccataaactgcgccatggcacaatgcggcttctcgggttgtatgacggaaacgaccttgcgtctgttgcaatgactgttgcggaaagcaggcagggcgctgtaatcggtgcggttgcgtgtttaccgaaattccgcaacaaaggatacggcacatacatagtaaatcaccttacaaacattcttgtaaaagagggcaagcgtgtgtttgtgcatagggcagagcaggcaaacaaggcattttacgattatttaaaattcaaatgctttgacagctggagtgaataccattttaaaggatgataaattttgagtttttttgatatagacaacagaataatcgaggcctcgcaaaaggctatggagctttgcaaaagcaaacttgatgaaattaacgatattcaggaatacaatcagcagaagatgataaaagcctttcaggaggcaggggtaagagaaagtcatttttcgggttcaacaggctatggctatgacgatttcggcagagatgctctcgaccgtgtgtatgcctatgcttttgacgccgaggacgcacttgtaagacataactttgcaagcggcacacatactcttacggttgctctttttggtattttaagaccgaacgataccatgctttccgtaacaggtatgccgtatgatacaatccgctcggcaatcggacttgagggcaattatcccgggtcgctaaaagattttggcattaactttgaaatggttgatttaaaggctgacggcactgttgattacgaggcagtcgagcagagaatcagagaagaaaagccgaaaatggtttatattcagcgctcaagaggatacagcataagaccttcgcttacatacagagaaatcaaaaagctttgtgaaatttccaaaaaagcgtcaccaaagtcaattattatgctcgataactgctatggcgagtttgttgaaaaggttactccaatgtctgtcggcgttgatattatggcaggttcgctcattaagaatgcaggcggcggcattgctcctacgggaggatatatcgcaggtaaaaaagaacttgttgagatgtgcgcatacagacttacaactccgggtacgggtaaggaaatcggtgcaacgctcggcaacaaccgtgaactctttatgggtgcgtaccacgctccgtttgtgtcttgcgaggcattaaagacggcagtgtttgcatcggctctttttgaaattctcggttatgatacaacccctaaatacagtgaaaacaggggagatattattcagcttattatgctcggaaacgaagaaaagctttgcagtttctgcgagggaatacagagcggctctgccgtagacagctttgtaaagcccgaaccgtcggatatgccgggttatgaaagtcaggtaattatggcggcgggtgcgtttacactcggctcgtcaatcgaactttccgcagacgcaccgttaagagaaccgtacgcagtatggatgcagggcggacttaatttctgttcgggcaaactcggcgtaatgcttgcggcggataagatattaaagaaaagcgaagaaaattaaaatataatttgacattttatttttaccgaactgctcataatgtatgggcagtttttcttttattaatcatttaaaccataatttaataatcttccaaagcatttaagacagaacctcttttaaataacacataaattccgactttgcataatataccattgtagagaataattattgtgcgggtgttaaaaatgaaaaaatcagagctaaaagcctttggcataattggtggagataaacggcagctttttcttgcaaagtcaatatcagactgttgttacgatgtaattctcggcggttttgataagctgaaaagcctcggtgcgattgaaatatccgacataaaaaccgcaatttcaaaatcagatgcaataattttccctttgccgtcaatttgcgcagacggtacggtaaacacgccgttttcggacaacaaaacaaggcttgacgaagaaatgatttctcttttaaaagaaaagccgatatttgttgctatgaaaaataaatttttaaaagcatatccgcagcttgcagactgcgaggtttacgattattcggcaaaagaggaatttgcggttgccaatgcgttgctcaccgccgagggagcggttgaaattgcgatgaatgagtacgagggtacgatttttgacagcaaatgccttgtttgcggatttggcaggataggaaaaatgcttgcaaaaatgatgaaatctcttaatgcacaggtcacggtaagcgcaagaaacgaagtcgattttgcgtatatagaggcactcggctgcaaacacatcaacacaaatgctctcaaaagcgtaaagggatacgaccttgttttcaatacaattcccgttatgatttttgacagcgacttgcttatgaacacagaccgcaacaccattataatagaccttgcctcacttccgggaggagtggattttgaggcggcacgcaggtacaaaaccgatgccgttcgtgccttgtcattgcccggcagaaccgcaccaaaggcagcgggagaaattatcagaaaaacgatttttaacataatcaaggaggtttacaggtgacaaaagcaaccattggctatgcaatgtgcggttccttttgcaccttttcacaagcctttgaacaaatgcagaagcttgttgattcaggctacagggtacttccgataatgtcaggtaacgcctactcaacagatactcgatttggcaaggcagaggaaatggttaaaacttgcgaggatataacaggagaaaaggtacttcacacctcggtgcagacagagccgataggaccgaaaaaaatgtgcgatttacttctgatagcaccttgcacaggcaacacacttgcaaagctgtcgctcggcgtaaccgacacctcggtaacaatggcggcaaaatcacatctgcgtattctgcggcctgtacttttgtgcgttgcaacaaacgacgcgctcggagcgtctgcgcagaacataggcagacttatgaacacaaagaacatttattttgtcccgatgaggcaggataattgtattaaaaagccaaattcacttgtggctgatttttctaaaatagaagaatgtgtagagcttgcactgcaaggcaaacaacatcagccgatatttatatgatacaaaacgacagttccgatttctgaataagtcagtcaaaaacggaaaatatacaaaacgaccctttacggtataatgcaatcaaaattaccgtaaaggggatttttatggcaaaaaagtgttttttataaataattggcacgattgccgatatattctaaagacagaaaagaagagaatgacttatgaaaaagataatttttgataatattataaaatatattgacaaataccgcaaaacgcagtaaaatttagataaaaataacagcaaatctttcaaaaatttttgctattattgagaattattttcttttttatctgttaagccgagtatataatcggtgctggtttcaaaatgctttgcaagggcgattagtatagatgtaggtatatcacgctgaccgagttcgtaattactatatacttgctgagaacagtgaagaatagcactcatttgtttttgagtcaaatcggcgtcttcacgcaattcccgtatgcgtctatacataattgtatcacttctgttttagtatagcataccgcacattgttgtattaataattactgcaaaatgcagtaattattcaggctttaacaaaaaatattttttacaaaggagagattgtaatgaaaaaagcaaaaagattaacagccgtaatactgtctgcacttatggcagtaagtgcattttcagcactgcctgtaagtgcggctgaggttgaaagtaatacttcggctgtgtcttcagatgaaaattttataagcggtgactatgagtattcattacttgatgacggtacaattgagatatccaagtatgtgggtaatgatagtgatgtaactattcctgatgaaattgacggaaaaaaggttacgagtataggtgaatgggctttttccagccttttaaatttaaccaatataactattccaaatagtgttataaatattggaaatggtgctttttccggttgcacaaacttaacgaatataacaatgccaaatagtatcaaaagtataggagaaactgttttcttaaaatgccaaaacttagtaaatgtaacaatacctaacagtgttacaagtattggtacttgggctttttcaagttgcaaaagcttaacaaatataacgataccaaatagtgttacaagcgttggtaggtttgctttttatggttgtgaacatttagcaaatatagcaatatcaaataatattactgttattggaatggatgctttttatgatacagcctggtataataaccaacctgacggtatgatagtggcaggtaaagtgttgtataaatataaaggaagtatgcccgaaaacacaaaattaattataccgaatgagattgtttcaattacagatgaggctttttatgattgtgaaaatctctcaaatgtaataattccaaacagtgttgcaagtattggaaatcgtgctttttatggttgtgaaaatctattaaatgtaacaattccaagtagtgttgcaaatattggtcatagtgcctttgaatattgcgaaaatttagaaagtattaatattccttatggtattaaaagtattgaagatggtacttttaaggactgttcaaatttagtaaatataaccattcctgagactgttacaagcattgcctcccatgcatttgaaggttgtatgcgattagaaaatatatcaattcctgatagtgttgttgatattggcagatatgcttttaattgtacagaatggtatgataatcaacctgatggaattgtatttgcaggtaaaatattatataactacaagggtgatatgccgaaaaacacagatattattatttctaacggaacaaaagctatttcacagggtgcctttagtgattgtgtgaatttaagaagtatatctatttcgaacagtatttcaaatatcagtagtgatatgtttagtggttgtacaggtttaacaaatgtattcattccaaatacagtcactgaaataggttataatgcttttgaacattgctcaagtttaaaagatattaatattccgaacagtgttacaagtataggaaacagtgctttctattactgtacaagtttggaaaatatagtcatccctgttggtactaaaagtattggaagtaacgctttttacggctgtttaaatttaagtagtgtaacgattcctaacaccgttacaagtattaatgaagcagtattcgaagattgtacaaaattaaaaagtatagtaattcctgaaagtattaatgctattaagtcgtttgctttttctggttgtacaagtttaaaaactattataattcctaaaaatgttaattttttgggacataattgtattggttattattatgatgaagacagtcacgattacttaaaaattgaaaattttaaaatttacggttacaaaaatactgcggcagaaaagtatgctcaagataatggttttgaatttataagtcttgcagatgatataatattttctgataaatctacaggtataaccgtcagtggtgttatgcaaaatgatgctgttttaaatgtaactaaacttgaaaacacatttaaaaattcagttgcaacatatgacataaccttgcaaaaggacggtgctgttattcagcccgacggtacaattactgttaaaattccaagcagtgcagaaaattgtaaagtaatgtggctaaagggtgacggtacagccgaagatatgaatgcaaaatatacagacggctgttatgtatttaccacagaccatttaagcgtttatgcattggtacaggataaaacaattctcacaggcgacgcaaaccaagacggcattgtaaatgtaaacgatgttacatacttgcaaatgcacattgcaggcaaaaaaaacaccgacggttcggcgcttattgacgaaacaaacaagcagttgtttgactgcgttgatatgaacaaagacggcaaactttctgtttctgatgtaacagcattgcagattcatatttcagaaaataactgataggagagattacaatgaaaaatacaaaaagaataacagcaataatattatcagcattaatgaccgtaagtgcattttcgactttatctgtaagtgcggctactgttgacagcaatgcacctgttgctttggcggatgataatttagtaagtggagattttaaatactctgttcttgatgacggtacagttgaaattgctaggtatgtaggtagtgatactgatataaccattcctgatacgatagatggcagagatgtcgcaagtataggtgatgaatcattttcaggtatgtatatctttgaccgtgatgttataataaccgttaatcttcccactacactaaaaaatattggggaaatggcattttgggatgataatataaaggaaataactattcctaatggcgttgaaacaatcggcgacggtgcttttggcggtacagctttagaaaaactgtttataccggagagcgttaagtactgcgaccatttattcgattttaatagactaaaagaaattactgttgacgaaaacaataaaaattattacagcaaagatggatgcttatttagaaaatcagataatgttctcttattctatcctaatggtaatgaacgaaccgaatacacaattcctgacggaacaacagggatagattattatgctttctttagaggaacggcaaaattaaagacattgactataccgggaagtgttaaaaccttaaaaaagtggacagctgctcacagtaatcttgataaagttattttaaatgaaggtgtggagagtattttgaaacatgcctttgtaaattgtaattttaaggaaatatatattcctaaaagcgtaaccactattgaagaattagcttttggatatgataatatggacagcttgagtcctcaaaaaattgaaggctttaaaatttacggctacaaaaatacagccgcagaaaaatatgcacaagataatgaatttgaatttattgcattggatgatgaagtcgttacaggcgactcaaaccaagacggtatagtaaatgtaaacgatgttacatatttgcaaagacatcttgccggcagcttaaatacagatggttctgcccttattgacgaaacaaacaaatcattatttgattgcttggatttgaataaggacggcaagctcaccgttgcagatgttactgctttacaaatttatatttcagaaaataactgataggagagattacaatgaaaaatacaaaaagaataacagcaataatattatcagcattaatgaccgtaagtgcattttcgactttatctgtaagtgcggctactgttgacagcaatgcacctgttgctttggcggatttccaaagtcaaaacgatattaagtggaatattgatttaaacggaacacttcacattagtggaagcggaattatcaacgaagatgaatcaagttatgacgaagaaggaataccttggtatgaggaccgcaatcgaattaagaaggttatagttggtgagggtattacaggtgttggaaattatgcgttttgggattgctgtaatcttgaaagtatagaaataccggaaagcgtaacatatattggtgtgttttgctttttgctcgatactaagctttatagtataaatgttgatagcaacaataaatattactcaagcgtagatggaattttgcttaataaagataaaacagaaattgtaaaatatcctaataaaatgcaaagtacttatgacataccaaacaccgttactgacatattgccatatgcgttcagagatgatacaaatttacagtatatatcgttgccgcaaaacataacaacagtgggctacggtgcgtttatggattgccctaatttggtaaaggtgactttaccaacagaattaacaactatcgattctgacgcatttggatacttgtttagaatgggtggaaatatacatgtaaatgattttaaaatttacggctacaaaaatacagccgcagaaaaatatgctcaggataatggatttgaatttattgcattggatgatgaagtcgttacaggagactcaaaccaagacggtatagtaaatgtaaaggatgttacatatttgcaaatgcacattgcaggcaaaaaaaacaccgacggttcggcttttattgacgaaacaaacaagcagttgtttgactgcgtcgatatgaacaaagacggaaaactctccgttgccgatgtaacagcactacagattcatatatcacagaataattaaataacaacaaatcctttcttgataaggcggcaggcacagacttgccgccttttgctttgtgtgtgaaaaatttgaattttgcgtaaataaaaaaataattcctataaaatcacaaatagtttacggtgaggtattgctacatatgcttttttgtgataaaatggtaaataatacgaattgcaaataaattattgtgatattttttataaaaaaaggaaacatttttatgaagctatgtactaaatgcaagcatttgcacaatgatgaggacgcagtgtgcagtaactgtaattctcctcttgagagcattaccgacgagaatactcccgtatatctcctttctgccgagggatttgagcttgagcgtgttaaaaccgcacttgaagacaattctatcccttgcgacagcgttattaaggacaaacagcttaaaaagcaggaatttataaataaaaattctgccgaaagcgatattttggttccttatgccgcatatgaaaaagcctacgatatatgtataggaatcggcgcaattaaagaagatgatactcaggttcttgaagatgcggttgagcaaaaaggcagtaacgagcctactcttgacgaaaaattcgaggagatgagcggcgttaaacgcacaactgtgagagttctttcagccattgcttttcttgcgcttgttgctcttgcagtgtacggcacagattttataacgggttttataaaaggtttatttggttaaattaattattttggaggaaaaactatgaatattgaaacaaaatgcgtgcaggcaggctggcagccgcacaaaggcgagccgagagaattgccgatttatcagagcactacttttaagtacgacacaagcgaagaaatgggtaaactctttgaccttgaggcagagggatatttttacacaagacttcaaaaccctaccaatgacagcgtagccgctaaaatctgcgctatggagggcggcgtggctgcaatgctcacttcaagcggtcaggctgcaaacttctttgctgtgtttaatatctgcgaggcaggcgaccatcttatcgcctcatcttcaatttatggcggtacatacaatctctttggtactaccctcaagaagatgggcattgaatgcacatttgtagaccaggatctacctgaagaagaacttgccaagctctttaagccaaacactaaggttgtattcggcgaaacaatcactaatccgactgtttctgtttttgatattgaaaaatttgcaagacttgcacattcgcacggtgttccgcttattgtagacaacacatttgccactcccgtaaactgccgtccgtttgagttcggtgcagacattgttactcactcaacaaccaagtatatggacggtcacgcaacagcggttggcggctgtattgttgacagcggtaattttgactggcttgctcatgctgacaaatatccgggacttacaactcccgacgattcataccacggtattgtttatgccgagcgtttcggtaaggcggcttacatcacaaaggctacttcacagcttatgcgtgacctcggtgctattcagtcaccgcagcacgcttattacctcaatatcggtcttgagtcacttcaccttagaatgaaaaagcattgcgaaaacgcacttgccgttgcaaaatatcttaaaaacaacgaaaatgtagcgtgggtttcctatcctgaccttgaagacgacaagtaccacgagcttgctaaaaagtatcttccgaacggttcttgcggtgtacttgctttcggtatcaagggcggcagagaagaatcaataaagtttatggattcgcttaagtttatcacaatcgttactcatgttgccgacgcaaggtcatgtattcttcaccccgcaagccacacacaccgtcagatgacagacgaacagcttattgaggcaggagtagctcctgaccttatccgcctttctgtaggtattgaaaatgcggatgatattatcgcagaccttgcacaggcgtttgaaaaaatttaaaaattatactcgggagttgattttatgtcagcttatgtttctgctgtaatagttgcggcgggcggctctgtaagaatgggaattgcagacagcaaacagtttattccgcttcttgacaagccggctattgaatatactttaaaagcatttcagaaatgctaccttataaaagaaattgttatagtttgccgtgagcaggatgttgaccgcattaacgaacttgtaaatcaaaacggatttacaaaggtcagcaaagttgtgctcggcggttcttcacgctccgcaagcgtgcgcaacggcattaaggcggctaatgaaaaggcaaaatattttgctattcacgacggcgcccgtccgcttattactgttgacgaaatcgaaagagttgttgaggcggcttttgaaaccggtgcggcaaccctcggaacatccgttacggatacaatcaaaatcgttgacggatttaataagattgagagcacaccgctccgctcacagcttagagcagtgcagactccgcaggtttttgaaagagatttgtatatgtttgctcttgaaaatgcaggagaaaacagccttgaatttaccgacgactgcgctcttatcgaaaatatgggcggcgaagttctcgttgtaaagggcagtgaagaaaatattaaactcaccactcccgtagatgtaattcttgcggaaagcatacttaaaaaccgcattaagaacggtaatttctga

SEQ ID NO: 567 - DNA, 14789 bp, unidentified
  source 1..14789: mol_type = unassigned DNA
atgacaatggatgaattacagccgggacagagtgcttatatcacggcggtcggcggagaaggtgccttgcggcatcatcttctggatatgggattgacgccgggaacggaagtcactctacagaagattgcaccgatgggtgacccggtacagatgaaggtgcgcggatatgagcttacgctgcgcttgagtgaggcacagaaaatagatgtggatcatgtgcatgaaaaggaagcggaagcgccaaaacagactgtgcgttatgagtcgattgaacatccgggagttggtgagttaggacagacggatcccactcatgtacatgacgagaagacggcagttcccaagggcggtaagctgacatttgcgcttgccggcaatcagaactgtggcaagacgacactgtttaaccagctgactggagccaatcagcatgtcgggaatttccccggtgtgacggttgaccggaaggatggtacgatccggaatcatccggaggcaacagtgacagatctgcctggtatatattcgctttccccgtattcaagcgaggagattgtgacgcgggaattcctgattgaaggtaagccaagcggcattatcaatattgtggatgcgtcgaacctagaacggaatctgtgtctgacgatgcagctcatggagcttggaatcccgatggtgcttgcactgaatatgatggatgaggtgcgggcgaacggcggtacaatccgtgtaaatgaactcgagcagatacttggaattccagtggtgccaatttcagctgcgaaaaatgaaggtatcgatgaactggtaagccatgccatgcatgtggcaagataccatgaaccgccgggaagaatcgatttctgtccggacagtaaggatgacaaagatccggttggagcggtgcatcgctgtatccatgcggttgcgcatatgattgaaaatgatgcgaaggaagccgatcttcctgtgcggtttgctgcaacaaagctgatcgagaaggatacaccgatcgaggatgcactgcagcttgcagaagataagaaggaagcatttgagcagatcgtgtcagtcatggagaaggaaaccgggcttgaccgggaagcggcaatcgccgatatgcggtttcagtttatcgggagattgtgcgagaagacggttgtgcgtccacatgagagtaaagaacaccggagaagcgtaaagatagataagcttctgacaggaaaatatacagcgattccgtgcttcatcgggattatggcgattgtttttgccatgaccttcagcctgcttggtgcgtggctgtccgatgtgatggcgcttggcgtcgatgcggtcattggatggatcgacaagggacttatcgctgcacagattaatccggtggtacgttctcttgtggtggatggtatctgtcagggtgtcggaagtgtcatcagttttcttccaacgatcgtgatcctgtttttcttcctgtcgattctggaggatacgggctatatggcgcgggttgcatttgtcatggataaaccgcttcgtaagattggattatcgggcagaagcttcgtgccgatgctgattggatttggatgttccgtgcctgcaattatggcgacacggacactctcgagtgaacgtgaccggaagatgacgatcctgctgacaccgtttatgagctgtagtgcgaagctgccaatctatacacttatgatcagtgcatttgtgcaacggcagtatcgtgtatttgcgatggtcggactttatctgatcggaatcgtgtgtgcagtgatctacgcactgattctgaagatgacgaaattcaagggtgagccggttcctttcgtgatggaattgccgaactaccggctgccgtctgcaaaaagcgtgctgcacctgatatgggagaaggcaaagggatttatccagaaagcatttacgatcatcttccttgcctcgattatcatctggttcctgcagaccttcgatctgcggttcaatgtggctgcatctgcagaccagagtatgcttgccttaatcggaagcctgattgctccaatcttcaagccgcttggattcggtgactggagagtatccacggcgctgatcacaggatttactgcaaaagagagcgtggtatcaacgcttacggttctgctcggtggtgatgtgacgagcgtggcaacgttatttactccgtttacggcaatggtattcctgatctttacgctgctttatacaccatgtgtggctgcgattgctactgtgaagcgggaaatgggcggcacaaaagcggcagtgatcacggttattgcgcagtgtctcatcgcatgggttgttgcattcttagtccatgcggttggattggcatttggcattgcgtgattcgtccgggcatttgtacatacaaagcggaaatgcttccatgtggaaaggcactgttaaccggctgggaaattcataattgataaataatatcaaaaaaatgcttgacattcattttcgataggactagtatgtcggtaaacaaagagcaaatgctgagaacagaacaaggttttcgaaaggaaatacttcagagagctgtcggttggtgtgagacagtgtaggatttcgggaattatcctctgcgagcagtgcactgaattcctagaaggacattaggtgtcaccggttttctaccgttacatagaagcttatttcacagatgacatgttgagatgatgcaaaggttgcaaatatatcgatatgcggtctgtaagatgagaatgagtggtcgcatatgcggcaaataaagtggtaacgcggaagtttaaaccttcgtctttatgtaagacggaggttttattttttgtatgccgatgagatttttcgtctggctgcaggatgtatttactctttgcaaatattcagaagggagccgccgcgtggcgggtgaggaagtatgaatggtttagtaattgttttaatcggaattgtagtgttgttcgcaggctatcttttctatggcagatggcttgcaaagaaatggggacttgatcctaaggctgaaactccggcagtgaagtacgaggatggagaagactatgttccatcatccaaattcacggtattttcacatcagttttcatccatcgcaggtgcaggtcctgtaaccggaccaatccttgcatctgtattcggctgggtgccggtattgctctggctattgatcggtggattgttctttggggccgtacaggatttcggagccttgtatgcatccgtgaagaacgaaggaaaatcgatgggtatgatcatcgagaagtatatcggtaaggtcggaagaaagctcttcatgctgttttgctggttgttcacattgctcgtcatcgcagcatttacggatatggtagccggaacctttgttggtaagggtgttgcggatatggcgaaggagacaagctatgcaaatgcatccgcagcttctatttctatgttgtttatcgtagcagcaatcgtatttggtgtaatccagaagcatgtaaagaatatgaacgaaggcgtcagagcagtcattgcaatcgcgcttttggtaggtatgtttgcacttggtatgcaccttccttggtatgctacaaagactgcatggatctacatcgttatggcatatctgtttcttgcatcggttatgccaatgtggttactgatgcagccacgtgactatatgacaacattcatgctgcttggcatgatcatcggtgcggttgtcggtgttgtcgtagcgcatccaacgatgcagcttaatgcgtataacggatttaatgtcggtgggaattatctgttcccaacattgtttgtaacaattgcctgtggtgcggtttccggattccacagtctggtatcttccggcacatcatcgaagacgatccgcaacgagaaggatatgccgatggttggttatggcgccatgattgtagagtcattgcttggtatcatcgcattggttgttgtcggtgctgttgcagtcaatggtacgaaaccggatggaactccatttgcaatcttctccagtggtgttgcgggattccttgagaagcttggccttccggttcagcttgcaactgtatttatgacaatgtgtgtatctgcacttgcactgacatcgcttgattcggttgcgcgtatcggacgtatgtctttccaggagctgttcctcggcgatacaaccgatacatcaaagatgcctgtatggcagaaaattttgactaacaaatatttcgcaactgtggtaacattattctttggatatttactgacacttggtggatatactaatgtatggcctttgtttggttctgcaaaccagctgcttgcagcacttgtattgattgcgcttgcagtattcttgaagacaaccggaagaaccggctggacactgtacgcaccaatgttcatcatgcttgccgtaacatttactgcattggtacagaagacaatcgcacttgtaaagaacatcgccggcggaaatgcaacaatgctggtcgacggactgcagtttatcgtcgcaatcctgctgatggtacttggtgtgctggttgcatttagttgtctgaagaagctgttcacgaagaaagcagaggctgaaaattaggagaattgcgaattaagaaagtgtaagcatatatttcaatatgattcatttcatatacaatgtattgaaactaagaagttctaaatgttcttggtttatatttagaaattatacgccaccgccgccgattcgacatccatgtctcagcggcggcttgtttgaacatcgtgttcaaacatggctgcgactgattacagaacattaagaacttctaagattcaaacatatcgtatattaaaatgaatcaatattgaaatatatgatttacattttctttcttgtttcgcaatgacaaatttttaactttggaaggagatacaggatgtgtacagcagcgacgtataagacgaagaatttttattttggacggacgctcgattatgagttttcgtatggcgatgaggtgacagtgacgccgagaaattatagtttcaagtttcggcatatgggcgagagaaagtcacactacgcgatgatcggtatggcgtatgtggcagatgattacccgctctactatgatgccgtaaatgagaaggggcttggtatggcaggcttgaattttgttgggaatgcgaagtatcaggatgtgcagacagggcgtgagaatgtggcacagtttgagtttatcccatggattttaagtcagtgtgcaacggtgctcgaagcacgcaaagcgttagaaaagatgaatctggttggaacgccgtatagtgagaagctgccatgtgcatcgttgcattggattattgcagataaggatgatgcaattgtggtagaatgtgtggaggatggcttgcatgtctatgacaatccggtaggagtgctgaccaacaatccgccatttccggtgcagatgttcatgctgaacaattacatgcatgtatcaccaagccagccggaaaatcattttgccaaggagcttccgcttgccacatatagccgtggcatgggtggactgggacttccgggtgacctttcgtcagcgtcccggtttgcaaaggtcgcatttacaaagctgcatgcaatctccggagagtcagaggcggagagcgtgagccagttctttcatatcttaggttcggtagagcagcagcgaggctgttgtgaggtggagccgggaaaatatgagattacgatctatacgtcctgtgtcaatgcggacaagggaatttattattatacaacctatgagaatcatcagattcaggcggtggatatgcaccgggagaatctggatggagatacacttcgacggtatccgctgatcaatgaggagcagattcatgtggtgaattagtagtcaatagtcttggttatagaaatgatctaatttttgtggaagttagagttttaggcagtcgatgagagtcggctgtctttttatgttagtttgagtggtaaattgggggaaaagttgtgaaaccggggaaatcccccaaccggaagctactgagaagcaagcaggttgggggaaaagttggaaaatcgggaaaatcccccaaccggaagctactgacaagcaagcgggatgggggaaaagttgtgaaatcggggaaatccccaaaccggaagcagcggagaagcaagcaggttgggggaaaagttgtgaaatcgggaaaatcccccaaccggaagctgccgggaagcaagcgggttgggggaaaagttggaaaatcgggaaaatcccccaaccggaagctactgagaaggaagcaggttgggggaaaagttgtgaaaccgggaaaatccctcaaccggaagctgccgggaagcaagcgggttgggggaaaagttgtgaaatcgggaaaatcccccaaattaaaaaaagggttgacagcagacagtttatacgctaacataacggtgttatgcgaggagccgcccacaggcgaagcctgtatcaggatggaacgaaaaggagcaagaaaagtggaaaaggaaacaagggagttgctgttggcgagtgccaagcaggaattcttggaaaaaggatatcagggagcctcgcttcgatcaatctgtaagaatgccggggtgacaaccggtgcgttgtatttcttctttcaggataaggaagatttgtttgcggcaattgtggagccggttttggagaagctaaaacatatgctgcaacagcatatgcgtcaggaactcatggaactgcaacagcttccggatgcaagggaagataacatgcaggatgatatgtttgcaagtacgcagataatccatcttctatatgccaactacgatatgtttatcctgcttctgacgaagagccagggctcgcggtttgaaacatgtatcgatcagtttgttgagatactggaacagggatatcgcgtatttgcggatgaacaggcaaagcagatgggggtagatccgccggatgcctatacgatccattgggtctctcatgtacagatcaatgcatttacccatttgctgctgcatgagagggatgagcagaaagcgctacagcacatggaacacgtcctgccgtatctggttggcggctggtacgcaatgttccaaaccaaataaagtaaatgagctatgccatgcatagctttttataagcctggaacataacagtgttatgcaagggcaagataattcaaatacatacaaggattatcgaaataggcgaatctgtcgttggaagcggatgattatgtagatgaagcagtttctatctaccaattcgtgcgcagaccattggaacacgccagcacttaacgagctgcaccgaaagcatgtaggtgcagagagtttagtgcctgttgcgtgtggaagtgagcgagagcgtgtctgcgcagaattgagtaggaggaactgcttcgaaaaaaggaggacaaagaagatgtatgtagaggtatcagatgtaaagaaaagctacggagagggtggcagctatatgcaggtgttgaagggcgtgtcggtaggcattgaaaaaggaaagatgtgtgtgattcagggaacgagtggttccggtaaatccacattgctaaactgtatcggtggactggatgtggtagattccggttcgattcaggtcgacggacaggagatggtaggacttaagatggatgcgctgtctgattatcgtagagattatctcggattcatcttccagttttacaatctggttccgaaccttaccgtgcgcgagaatattcaggtatgcgaatatctgacggatcagccgttagatatggatgagcttctggctgtgcttggactgaccgagcatcagaacaaattcccttcccagttgtccggtggacagcaacagcgttgtgcgattgcccgtgcactcatcaagaatccgaagcttctgctctgcgatgagccaaccggagcgctggattcgagaacttcacgggatatcctcattttgttagagaagatcaatgcgcagtatggcacaatgatgatcatcgtcacacacaacaatgcaatcaaggatatggttgatcaggtgatcgtcctgaaggacggacagatcaagaaaaattataacaatgaaacgaaggtgccggcagcagaattggaggatttgtaagatgcagaaagtattacgcaaacgaattttcagagatttcaaagagaatctgccgcgctatctggcactcgcatttttgctgattctcagcatgtatatggttgtgagtattgttggagcagcagagacagttatgcgtggcacaacaaccgaggcggagaagcagaacgtcgaagatggtcagttttccctctttgttccgatgaagcagagtgagtgggacgcattgacggataagggaattacattggagaaaatgtttttcttagattatgatgtcgatggggataagacacttcgtgtgttcaagaatcgtaccaaaatcgacacgattgcgattcatgcgggcaagctcgctcaggcagacgatgagcttgtgcttgagcggcaatatgcggagaaaaacgatatacacgtaggagatacaattgttcttggtgaccgtacatataaagtaagcggtatcggcacggtgccggattacgacagtccatcgaaatcactcggcgacacagtctgtgacagtctgaacttcggtctggcatttgtgacagatgaggcgtacacgatacttcagaaggaaggcaagagtgagaagtccgaggaatattattatgcatacaagttaaatgatgcgatgaccgatgacgaattaaaggcagagttaaagcagctttccttctcctccgacgatgtggatgatgcgtattttcaggagtattgggaccggacgctcggcagggaagaggaatttcgtgatggaattaacgagcttgccgatggggcaaaggagcttgcggatggattgtcagagctgacagacaataatcacgatctccaaaaagcatccgaccagatatttgcagcctatctcgaacaggcaaacagtaagctctctgcctacggagttgagattttgaccgcagataatttcgaggaagtattagataagcagattcggtccacaaacaatgcaatgctgcagcttgggcttgtgaatgcgaagagcgaattgcagaagctgaaagcattttcggatggtatctatgaatatacagatggtactgcggacgcagctgacggtgcagctgatgtacaagatggcgtgcaggaattaaaggatgagacagcggatatgctcgatgagatattcaatgctgatgcgaataatctgctgtccttcgtaactgcagaggacaatgtgcgtatccatgcagccagtgatgatgtggagatgaacaatacaatcggtatgattgctggcgttttgctcctggtgctgattgcttatgtgctttctgtattcgtggtacattccatcgatcaggagagcgctgtgatcggagccctctatgcactcggtgtagagcgaaaggatctgatgaggcattacatcctgcttccgaccttgatttccctgatcggaggtgcaattggaacagcactcgcttacacaaagattggcgtgcggtaccagatgcaggatacatattattattattccctgccggatatagcggtacagatacggccatatacaatcgtatatggtgttgcaattccgccaatcatatgtctggtcgtgacaagtcttgttatccgcaagcgcctgtcccgtccagtattgacattgcttaaaaatgagcagaaggctgcaaagggcaaggatgtgaagcttggcaacatgaagtttatgaaactgttccgtatccgccagatcctgcgtgagagacggactgcacttaccgttgtattcggtatgtttgtcagtatcctgctgctcgttatgtcaatggaaatctatgtatactgtcgtgctgtacaggatgattatgtcgcagatacaaaatttgaatatatgtatacctataaatatccgggcgaggaagtgccggatggtggctatgaagcttatgccaagacgttgaagaaggaaatctatggatataacttcgatgtaacggtgcttggcatcaaggagaacaatccgttctttgatgtgacactttccgattccgcagacaaggtaacaatcagctcatccatttcttacaaatatggattgaaaaaaggggatgtgatcaccctgaaggatgaggaaaatggaaaaatctacgcatttgagatcgaggcagtgacacagtatgcgccaagcttcatggtgttccttccatatgataaggcacttgacttgttcggtgagcaggatgattattataatgtcgtatttgccgatcatgatctgggtgtggaaagtggacgtctgtattcgacgatgacacgtgacgatgtgaagaaagcagccggaatcttctctgaccagatgcgttcgatgattattacgatcggcgcggtatctgccctgatctttgcgattgtcctgtatctgatgatgaaggttatgatcgatcgttcttcattcagcattgcgttgatcaagatcttcggttaccggaataaggaagtcaagaagatgtatttagatggaaacttctatatcgttttgatcggtgcacttgtttcagttccgcttgcgaaggtactgcttgatgcggtgtatgagccgcagttcgtaccgaatatcgcttgtggtgtcgacaagtccttcccagcatggctgtatctggcgatgttcgcaggtgtgctcgtattgtactttatcatcaaccatctgctcgtacgaagaatcaagcagatgctgccggctgaagtgcttaaaaatcgcgagtaaaatgagaaaaaaacgcatgtatttccattgagaagcatgcgtttttttggtacaatatacatatctgaattatgatacgaaaggggattatgacatgggatttttagaaggtaaagtagcaattatcacaggtggcggacgcgcggtattaagcgacggaagctgcggttcaatcggatatggaatcgcaactgcctatgcgaaggaaggcgcgaaccttgtcctgaccggacggaacgtacagaagctagacgatgcaaaagaagaaatcgaacgcaaatacggcgtgaaggtgcttccggtacaggcagatgtaagcgccggctctgacaatgaggcagtcgtggcaaatgttgtaaagcagacgatcgatacatttggaagaattgatgtactgatcaacaacgcgcaggcttctgcttccggtgtgacgatcgccgatcatacaaccgcacagtttgaccttgcgatttattccggattgtatgcagcattttattatatgaaagcatgctatccatatctgaaggagacgaagggctccgtgattaattttgcatccggtgcaggcttgttcggaaatttcggacagtgcgcttacgctgcagcgaaggaaggcatccgtggactgacaagagtcgcagcaaccgagtgggctgccgatggcatcaatgcgaacgtcgtatgtccgcttgcatggaccgcacagcttgagaacttcgagaaagcatatccggacgcattcaaggcgaatgtccacacaccgccgatgggccatttcggagatgtagaaaaggaaatcggtcgtgtctgcgtacagcttgcgtcaccggatttcaagtatatgagcggtgagacattgacactggagggcgcgcttggtcagagaccataatcggttcaaaaaagtaaaatagaaattgacagttgccacataattcgctatgatttgtcattgaagaaacgagttccaacgaggagataagtatgagacgatgtgcagatcataagcgaatcattgtggcaattttaattgcagccttaagtattctgtgcgcatttcacggaaatgacagcattttggaagtgcatcatacagagcaggtctgcctgcagaagtcccagacggcaatctccgatacgacactgcggaagattgaaggaaccgaaatcttcgagacgaatctcacgtcaagaatgcggtcatctgagcggatcgagcgaatgaaagcttcgcggaagaacggatgcgctgtttcttatctggcatgtcttgccatgcagcggccgatgcagagtctgtctgtcggtatcccggaaatgctggtgcagagtgatcttacaccacgatatttggttattttgtatttacatcgttccgatgggaaaaagtcccatctattcgcataacacgatcagattgttatgtataaaatgaaaattgaatagaaaggacgtaaactatgattacattaaaagtaataggtcttggtgtgattatttcttatggaatcgcctgcctgatgaagctgactatggtttgtattcagaaattcagtaagagaggggaggacgaggagaaatgagtatcttagatcttttccagggtatcggtacgatgtttgcgcagtcaccacagattgcgattgcgagagtcgtgttgatcttcttaggattcttattggtgtatttaggcgtgaagggaacgttggagccgctcatcatggtgccgatgggacttggtatgtctgcggtcaatgcgggcgttttgttcctcggtgaaaatcagatcggaaacctgatcattgatccgctgctttccacgaccgatgagctgatgacatacatgcagatcaatttcctgcagccgatttataacctgacgttcagtaacggattgatcgcgtgtcttgtatttatgggaatcggtatcttgtgtgatatcggttacgtgctcgaacacccatttatcagtatgacaatcgcgctttttgcagagcttggtacagttgcaacctatccgattgcgcgtgcgatgggacttgacgccggttcttcggcagccgtttccatcattggcggtgcggatggaccgatggttctttttgcttcgctgaagctcgcaccggagcttttcgtgccaatctcgattgttgcgtatctgtatttaagtcttacttatggtggctatccatacctgatcaaacttctgatcccgaaagaaatgcggggaaagcagattccgaaggagaagaaggtgagcaagatccgtccaaaggagaagattgtatttgcagtaattacaaatgcgctgctttgcctgttgttcccggttgcggcaccgctgtttttgagcttcttcgtgggaatcgtaatccgcgagaccggaatctctgcgtacatcaagatgattggagaaaatttcctgtattttgcaacgttcttcttaggattgatgcttggagttctgtgtgatgcaagcacgcttttggatgcaacggttgtgaagcttctgatcctcggtatgctgtcgttattgctgtccggaatcggtggtatcattggcggctatgttgtatatttcttcaagagaggaaagttcaatccgacggtcggcatcgcaggtgtgtcgtgtgtgccatctacagcgaaggttgcacagaaggctgctgcaaaggcaaatccggcagcatttattctggattatgctctcggcgcgaatatctgcggcgttatcacaacggcaatcctgaccggtatctatattacgttacttagttaaatcaaaatccccttctgtaccggaagcaagcgaaatatgctctggtgtggaggggattatttggttgagattgagttttgtttgacataaaatatgatacataatagaattggtttaagagataaaaagaggttaacaaatcggtatttttagaactaaggaggaatttatgaaaaagatactagtaacagggggaacaacttttgtaagtaagtatgcagctgaatattttgtgaatatgggctatgaagtatatgtacttaacagaaatactaagtcacaagttcggggagtaaaactcattgaaggcgatagacataatttgaatggtatattgaaaaacctctcttttgatgttgtggctgatataacagcttataacgaaaaagacattattgattttgttaaggaattaggttcttatggacagtacattatgattagttcaagtgctgtgtatccagagtatggagttcaaccatttcttgaagaatcagaaaaagccgcaaatatcttttggggtacatatggaactgataaaatagcagctgaaaaggcattacttgaaagagtgaaagatgcgtatatattaagaccgccatacctatatgggcctatgaataacgtttatagagaggcgtttgtatttgattgtgccttagcagatagaaaattctatttaccaaaggatggagatatgaaattacaatttttccatgtgaaagatttgtgcaggttgatggaagtgattataaaggaaaaaccagaggagcatattttaaatgttggtaatgctgaagcagtatctataaaagagtgggttacaaaatgttacgagagtttaggaaaaaagccgacttttgtaaatgtctatgaggaaattgaacagagaaattattttagtttttacaactatgagtactatttggatgtgtctcgtcaaggcgagatattctcggaaactacaactttagaagatggattgaaggatgcagctgaatggtatcttgaacataacactgaagttaataagaaaccatattttgagtttattgatgaaaacttagtggaaagttaa

SEQ ID NO: 568 - DNA, 8689 bp, unidentified
  source 1..8689: mol_type = unassigned DNA
ttgataaccaaagcaaatttccagagaagatggagagtttgtccggacagtcaaaattttctctggaaaattgacaacaaacaattagaaaagacaaaaacgatagactacaggggtttccaaataacaaatagtgaaggagcgattcttatggaggaaaagaaatacttaaaatggtacaacaagataggatacggatctggtgatattgcgggaaatgtagtgtatgcattcctgacatcatttgtgatggtatatttgacagatacgattggattggcatccggtatagtgggaacactgattgccgtttccaaattactcgatggatttacagacatcttttttggatcaatgattgataagacgcatagtaagatgggaaaggcaagaccatggatgctgtatggttacattggttgtgcaatcacattggtagcctgttttgcagttccaacaagtcttggcaggacggcacagtatgcgtggttctttattgcgtatacgctgttgaatggcgtgttttatacggcaaataacattgcttattctgctctgacatcacttgtcaccaagaacagtaaagagcgtgtgcagatgggttcttaccgtttcatttttgctttttcaaccagtcttctgattcaggcagttactgttggatttgttgcaaaatgtggtggagatgcagccgcatggcgtatggttgcaattatttatgcagtgatcggattggttgtgaatactatttccgcattatctgtcaaagaacttccggaagaggaattaaatgaaggagacacaacaggtgaagaggaaaaatatgggctggttcaggcattcaagctgctggtaaagaataaattttatctgatgatctgtggtacttatattttacagcagttatatagtgcaatgatcggtgccggtatttattatatgacctgggttttgaaaaacaaaaatctgtttggacaatttgcctgggcggtaaacattcctcttatcattgcattaatctttacaccaacgctggttggcaaatggaagggtatgtataagctgaacttgagaggttacatccttgctgtgattggcagagctcttgttgttgttgccggatatatgggaagtattcctttgatgatggcatttacagcattagcagcattaggacagggaccttggcagggagacatgaatgcagtgatcgcatcttgttccgagtatacatacctgacacagggaaagcgtgtggatggtacgatgtattcctgtacttcacttggcgttaagattggcggaggtattggaacagcagttgtaggatggctcttagaacttagcggatatgtaggaactcatgctgtgcagccacagtctgcactgaatatgatgcagtttatgtatctctggctgccgctgatctttgatgtgcttattatgtttattctttccagaatgaatgtagaagagacaaatgcaaagatcaaaaaagaaaaaggaattacagtagaagctgctcagcagtaatgagcagaaattggtaacaggaaagcattgtcttaattgaataaacaattacaggcaatgctttttgttccgtaaagaaaaggaggaatggttatgggtagcattttagtattaggtggagccggatatataggttcccacacagtttatgaattgatcgaagcaggaaatgatgtagtagttgtagataatcttgagacgggatttcgtgcagcggttcatccggaggctaagttctatgagggggacatccgaaatcgcacttttatagattccgtgtttgataaagaaaatatagatggagttatccactttgcggcaaattcgcaggtgggtgaaagcatgataaagccgctgaaatattataataacaatctgtgtggtacggagatactgcttgagagtatggttgcacatggcgtggacaagattgtattttcttctacggcagcaacttatggagaaccggaacgcattccgattatggagacagaccgtacccttccgacaaattgttacggcgaaacaaagctgtctatggaaaaaatgttcaaatggacagcatctgcacatgatcttagatatgtttctttgagatattttaatgcctgtggtgctcatccaaatggaaagataggagaagcacataatccggaaacgcatcttattcctttgattctgcaggtgccgaacggaaagagagagtatatttccatctttggaaacgattatgatacgaaagatggtacttgtgtcagagattatattcatgtaaatgatctggcgcaggcacacattcttgctatgaaatatcttcgtgatggaaatgacagcaatatattcaatcttggtaatggagtgggatttactgtaaaagaggttgtagaaactgcaagaaaagtaaccggtcatccgattccggcaaaagaagaacctcgtcggtcaggagatccatctatgctgatcgcttccagtgcgaaagcaaaggaagtgttgggatggaatccacaatatgcagatttggaaacaattatagatacagcatggaactggcataaaaatcatcccaatggataccagaatgtgtaagggggggaagtgccatgataaatgagtgtatcaatgaacttgttgcgtatggattaaagaggggcttagttgatcctgcagatgaagtatatgtaacgaaccgtttattggaactgttccgtttaacggaacacgatggagtggtagaacaggttcagccgagaaaactgtcacagattttaaatgatatgttggaatacgcataccaacaggggatgctggaagaacagacagtcacagaaaaagatctgtttgatacaaagattatgggagaattaacgcctccaccatcggtagtccgcaggcagttttttgaaaagtataatatttcaccaaaaactgccacagatttttattatcaatttagccaggcaacaaattacattagaaccgaccggatcgcaaaagacgaaaaatgggcggcagatacagaattcagcgatttttggactgcatataaaaaaaggaccatttcacatttgtgaagtggtctgctttttcagtattcagttttcacaaatagtccttttagccggattatgcatgatatacatgctcaaagtatccttcatagaaggctaaaaggttgttcatataatttttgaatctgctcattttgtattcctcctttccttgtttgcaagttcattataggacaggctggataagaatgcttgccaaattaaaagaaaatgtagacaaatgttgcagaggaaatcaacaattaagtaataaaggggagatatatcaatgcatttgacgtttaaggaaacaaaggaagaggtatatgcggcgcaaagagtgtcaaaacatgtatctccacatttacataatgcattggagattgtgtgtgtaacggaaggaacacttgagatgggagtggggcaggaattatatcatatggaaaagggtgatatcggatttgtcttttctgatattattcatcattatcaagtgttttcagaaaaaacgagccgggcggattatatcttggttccgtcttcttttgcaggagtatttaaagataaaatacaaggatatgctcctaaatatccggttattcgtgcggggcagattgaaccagatgtttatcatgcaattcaggcgattatccaaatggaagaaaacgaacctatgattgttcaagcttatgttcaaattgtgctggcaagatgtataggaaaaatggaattggtggaaaaaagttgcgtggggagtgatgatttgatatacagaacagtatcttatgtgtcggggaattttaggaaaaaattttctctagaggagatggcacatgatcttggagtaagtaagtatgtcttgtcacgagtattttctaaaacatttcatcgtaatttcaatcagtatcttaatgatgccagattgagctatgcatgtacaagattggtaaataccagtgatacgatcctgaatatctgtctggacagcggttttgacagtcagagaacatttaacagagtgtttaaagaacgctataaaaccgcaccaagtgaatatcggaaaaacaaaagacgaaatgcgatatcttccggaagaataccgagaaaggttgatcggttatcttaggtgcctgcgggatgatatgaaaaaataataaaaatgtaaccttttgtttcaaattgctgtcataatatatagcgcgcaaaaaaaacttattgcagtaggaaggaagcaggaaaatgaaggaacaaaagaaaaaacggcacatagaagggatggatgcgttaaggggttttgctatattgggagttgtcctttaccatgtaatgccggggcggtttccgggcggctttctcggagtcaatatgtttttagtactgtccggatatctgatctataaaacatctgtatgggacctggaacatgggaaatatgcagcaggcagattttataaaaagcgttgcataaggatttatcctcctctgctcattatgatcattgcagtgtggggcattctggcggtcagtatgccggaggtggcaaagggcaagggcggtgaggttttaagcgttgttgggggatataataatttctggcagatccggcagaatgcatcttattttgcaaggatgagccagcagtcaccatacacacatctgtgggcgattgccatagaaatgcagttttatcttatgtggccgctgttgttttggcttcttcggaaactgaagaagcatacatccatgacggttgccagaacagctgtgcttgttctggtgattcttggtggacttcgtatgagcattgtctatcgtccgacagaggatgtatcaaggctttattatgggacagatacaagaatatatgccctgtttttgggaatgtttattgcaatgattcagaaggatgtgatatcctttgtacaaagaaggctgccgtcatggtttataaacagcctgacagcagcagggctcgtggtgatgacgggagcctatttcatagcggaagggcagatgccgtatatataccaagggggaatgtttgcagatgggatactttgtgcactgattcttttgctgattccggcgggaagtacgggggaatggctagacaaaagtccctttgccttagtaggaagaataagttatgagctttatctgtggatgtatccgatcatttttctgtttgggtattataagaaaaactttggtccggtatcctggtgtgtacagatgatactgatggtttttgcggcatctgcgatgcatggactgatggtattttttcaatataagaaaaaacagaacccgaaggggaatggtgttgtcataggttataccagtaccggattctctgtagcctgtattgtactggctgtctgtgtaatcactgcgtatcagctgccgggggaagctgcgaaggatactgccgtaaaagcacaggcaatggcacagcaacaacacaggagaatttctgacgagggaaaagcttcaaaagagaaagcaccggctgccggggaaacagaaaagataaaaaaggctcccttagagaaaacggatcaagatgacaatgccggcatccgtgggcagagtattaccgcaattggtgattccgttctgcttggtgcttccggggaagtaaagaaaaagctgccggactgtctgattgatgccaaggtatccagacaggttattcaggcgaaggatattgttaaagacctgaaatcaaaagggaaattaggagatacggtcgtgcttgcgctgggaacgaacggaaccttttcggatgctaccggcaaagagctgatccgtgcgattggaaaggatcggcagatttattgggtcacagccttcggggagcatttgcagtggcaggaagaggctaatcaccagatccgatccatggcagagcaataccaaaatgtgcagattattgactgggcatctcttgcagaagggcacccaaagtggtttgtatccgatggagtacatctgacctcttccggatgcaaagcctatgcaaaactatattatgatgcaatcgacaacaacagccggaaatgcattacaaagaatcaggaggagtagacctgcagtggcaaaaggaggaaaaaatggcagaatcatcatacaattcaaagggggaacaaatggcatgggatgaccgggagattattgcgcaatttctgtgccgtgatgaggctgccattaaaaatactgcggacaagtatgaaagatattgcagttccattgcctatcgtattttaggaaatggagaggatgtcagggagtgcttgaatgatacctggctgaagttgtgggagtccattccgccgacagtacctgagattttgtcggcatatgtgggcaaaataaccagaaatctggcaatcaaccgatatgatcatctgcatgccggaaaacgctgtggggacagtgtggatcagtcgttggaggaattaaaggagtgtgcatcgttggcgcatgataatgtgagagaggaaatggaccggagggatcttgaggaagcaatcaaccggtatctggacggactgccgtcaaaaaaacgacagatctttgtccgaaggtatttttatctggatgagatataccagattgcagagcattttcatatgacggagtccgcagtcaaggtgggattgcaccgtatgcggaagtccttaaagatacatttgcaaaaggaaggatatcatatttagaaacaagcctgtgaaaaaatcagggctgaattaagaaatgaggtaatagttatgtcaaagaaaaagatattgtgttatgttttattgactgcaatgttagtcagtatgtttgcggcaggagaggtgtctgtggcggcagaacaacagaagccggcatattccaatcttgcagatacaaagtcgcgaaaagaagtaaggagtgctcttttgtcagcggggatctccgccaaaacaacagatgcctggctgaaggatgtcgtaagctacaataaaaccatccaaaataccagtctggtaaaaaaaggcttcaaaaagatggggaaaaagccaccggtatataatgaaaaccggatcagtaagctctggctgaagaagaataaactgtttatcggttataactgcaggatcactgcctatgatctgatgaaggactatattaaggtcggcaataccggaaaagcgaatccgtcgcagctgtttatggatcaggatgcgttaaagaatgcaccaacgaagaagttttcaggaaagcagagaaaagcatttgagagtatattctctacggtgcagacgaaatatacgaagaatgtggcaacacatgcagcaatttgggcaaaggattggaaaaacaaaaagatttctgtttccggcaagacaaaggcaactctgatcagcgtcgttttgcattccagttttagcaaaacggaaaatgaactgtttgtgggtcataccggcgtgctggtgccgacaaagaatcataaatatctgtttattgaaaagctgtcattccaacttccttatcaggtaacccgttttgaaagcaaagaacagctgaatgattatctgatgggaatgtatgacacggaatgggggcaggatacggcaaagccatttattatggaaaatacaaagctgatgaaggaatatcatgcagtgtctgaccgatagaacggatagtaacgaattttcaaatgcatggaatggaggaatcagatgagccgaaggatcaaaaatacaatcagcagcaaggaactgctgcaggcaatgggaggaatacgggactgctatgtgaaggaggcagattatgctgcttgtgctgtcacgaagaaacaacctcacagatggtatgttgctgccggtatggcagccatgctagcattgagtattctccttccaaatcttaataaagcaacggcttatgccatgcagagtctgccggtgataggagaatactttaagctggttacattccgggaataccggtttgatgatggaaggcatagtgcagacgtaaaatggaataaaatctatgcagatagggcagggatggatgactccgaggaaaccggaaaacaggcgcacaaatcagtcaaagagatcaatgcgcagatggagcaaaagaccgagaagctgctcaaagaatttaagaagcaggtcggggcgttgggctactcctctctgaccgtggatagcaaggtggtcacgaactcttcgaaatattattgtgttatgctgtctgcgttctcctcccaggcagatggataccaggcggatgccttctatacgatagaaaagagtaccggaaacctgctggaattatcgaatctgttcccggagaatgcggattatgtagatgtacttacggcacagatcaagaaacagatgcgccaaaatatgaaaaaggatgaaaataatgtgtattttctggatacagatacaccagtagcattgtttgacaagattgatgaaaaccaacagttttatatcaatggaaaaggtgaaatagtgatctgctttgcagagggggatgtagcaccggcttccatgggaacacttcattttgttatcccacaaaaagtggtgaaagaacttcaaaaaaatgaatga

SEQ ID NO: 569 - DNA, 8517 bp, unidentified
  source 1..8517: mol_type = unassigned DNA
ttattttatagcgtcgagtgcgtttgagatatctgcaatcaaatccaccttgtcctcaagacctaagcttattctgataagctctgccggcactcctgcttccttaagctgctcatcattcatctgacgatgcgtgcttgttgccggatttaagcagcaggttctcgcatctgccacatgtgtctcgattgcaccaagccttaatgccttcataaatgcagacgctgcctctctgccgccctttaagccaaatgatacgactccgcagcctccgtttggaagatacttctgtgctctctcatagtatttgtttgaaggaagccctgagtagtttacataggcaacctttggatgattttccaaaaattcagccactgcctgtccattttccacatgctttggcatacgcacatgaagtgactcaaggccaagattcagcataaatgcattctgtggtgactgcatagaaccaaaatcgcgcataagctgtgctgtacatttggtaatgaacgcaccttccttgccgaatttctctgcatatgtgatgccatgatagctgtcgtcaggtgtgcacagtcccggatatttatctgcatgtgccatccagtcgaatttgccgctgtctacgattgctccgccgagtgtggctccgtgtccgtccatgtactttgtggtagagtgtgtgacaatatctgcgccccactcaattggtctgcagtttacaggtgtcgggaaggtattgtccactataagcggtactccgtgctcgtgtgccacctttgcaaaaagctctatatcaagcaccgtaagcgcaggattggcaatagtctcaccaaacataagctttgtgttcggtctgaatgctgcattcagctcctcctctgtagcatcaggagatacgaatgtagctgtaatacccatctttgccatagttaccgcgatgaggttgaaggtgcctccatagatggatgatgatgccacgatatggtctccgcactcacatatgttgaacatggcatagaaattggctgcctgtcctgatgatgtgagcatggcagcagtgccaccctccatagctgcgatttttcttgctaccgtatcacaggttggattctgcagtctgctgtagaaatagccctctgcctcaaggtcaaaaagctttcccatgtcctcgcttgtgtcatatttgaatgtagttgactgaataatcggaatctgtctcggctctccgtttccggctgcatagcctgcctgtacacactttgtacctatactgtattctttcattgtgcttctcctttattatgttaatgtttcagttggatatagtatattacatttggcgcgttttgacaaattcttcaaatcgtggaagtgtgagagtaattttaccgtactcagaggtatctataaccccctttcttttgagccggtctctatataccgagaataatcctgaattcatatccagtttttctctgatttcttttaccttttcttcaccacttactgatatttccaacaatatttttttatcaagctctgacagctccgaccagattttactgtacacatactcatcaaggcactgatcatattccggtaaaatatcttctatcgtgtgatcatccctgttttcccagtaaagatatcccaatacctggaatgcaaaaggatatccctttgtaagagctgccattttgtctgcctctctttgatccagatcaaaaatatccatatagtgtttcctgactgctgtaaagctaagtggctcaagcattatcttaggcgccctgtacaaaaatgtaagtgccttgtcgttctgcagatcatatatattttcaaacagccccgtcataagcagaaaaataggataatcctgtctcagaaatatctgaaatgaactgacaaatacttttacaaattcacagttcataacctcatcaactgaaatgagtaaccgcttattatgtttctttatattttcaagcatcaattccagcacattttctatatccgtaaccggtgctgcattttctatggaaacgcccagtccaaacgctgaaaaatccagttttgcattgacaaatattttattcatctgaggcatactgtaaatcttagctgcaaggctctgaagcatatctctcgtagggttaagctcaactgtcagccattcctcatccttctttatctccgatactatattggtcatcataaccgttttgcccgatccccttaccccggttatcataaaaagctggtttgcaggattttctgacctaaatgtctctactatctgattggtctgtgagattcttgatatatattgcagtggttttttcccgaatgataatgtaaatggattttgcattttgttttccccttatataactttatataactttttgtttcgtatataagtttatataaccttatataactttgcatttattatataactttatataacttttgtcaccataaattcttaatctttaaaagcatctttataagatattttatctaccagcgcttcataactgctatcatcagcttgtactatctctctgacattgtgctgctctaatgctgctgttgttttttcacctattgagtatgctgtttccacgtatgcattctccggcagcatatgaaaaaatctttccacatttgatgcgcttgtaaaaacagcttcacttaccatgtttccaatgctttcaggaatactctcatatgcctgctcatttacatatgcatcaattttttctaattcacatatttctttaagccctgcctcaaggtcaggtgaagcctcctttgccgagaaaatgcagactttgatttcatcattatcgcccatatacgaactcaattctcctgcaagtccttttccggtctgttctgccggaataatatctgcatttatgtgatgctttacaagctctttttctgtagcttttcccaccactgcgaaccttgcatttgctataagcctgatgtctgcccctgccagatccagattatagaaaaatgatcttacaccatttttgcttgtaaaaactatccagtctgctgatcttaccttatcaacaaatttaggaattataactggtttaattatgcctgtcttaaccggtgtgatgtctgctccaagctgctgtaattttgctatcaattcgtttgttttgatatacggtactgtgatctttcttccaaacagcggtcttttttcaaagaaatcaagcctgtcattcagtgaaaccacatctcccacaacgattatagccggtgatgtcagctttgcttcctcaatcttttctccgatatccgcaagcgttcctatacatttgcgctgcgcggcaagtgtgccgttcgatatcactgctgccggagtatccgctcttcgtcctgctttcataagccctgctgcaatgctttttacatgcgcaagtcccatcaaaaatacacaggtgattgtctcatctgtaagaagggaatagtctatatctgcctcctcatcccttctgctgtgcgcagtgatgacctgaaagccttttgctatgcctctgtgtgtgataggtattcctgcagccgcaagcgctgcaaccgatgaactgacacccggtaccacttctacctccacatttctatctaccaggtagagagcttcctctccgcctcttccaaagacatacggatctccgccctttaaacggactacaagctcatgatattttgatttctcgtataaaagctcgtttatggcatcctgcttcatgacatgcttgtgattttccttgcccacataaataagctcacagcctgcctttgccattgaaagaaactctggtgatgatagcctgtcatacaccagacaatccgcctgttttatatatttttctccttttaaagtgagcaggcccgtatctcccggtcctgctccaactaatactacttttcctgtgttttctctcatgattttcctaattatttttctactgaattattatgattaaaaattatgacttgatattttttagtcgatttctaatttataccgaatatcgtgcacggcacgctccacaatattgtttctgtctgatgtaatatcccatacctgctctgtccttgcaagctgtcttccatcctctgagccaaacatcgcaagaagctttagcctgttatttttgtcgctgtcattaccgcggactttttcacttacaatatcacagtatgcagccacaggcagatggcagtttccaccgattcgctttaaaaattctctctcaatgcctgcgcacagattggttttctcatctgacaaagcatcaagctttgccatcagcttagcattgtcagcacgtagctcaagcgccagtgtgccctgtgccggagccggaatcatatcatcctccgaaaagtactgtgtgatctcagaatctcttccgatacgctttattcccgccgctgcaagtacgattccatccagcctgtattcgttatacttattctgtttttcgttagctatctcattgttatttacagtattatcggcaacctcttcatatataatttcaccatcatatagcttacgaagcctcgtatcgatatttccgcgtatgccaaccaccttaaggtcaggacgcagctttaaaagctgatactttctgcgcttgcttccggttcctatcacggcaccatgaggaagttcatccagtgaagcggcattttttagcaccaaaacatcccttggatcttcacgcttccatgcctttgcaaatgtaagccctgctgccggttcatcaggcatatccttcatggaatggactgccatatgaatctttcccgataaaagctcgtcctctatctcctttacgaagataccctttgagccaatcttatcgagtgcctttttctgctctaaatcgcctgttgtctttatgataacagccttaaaatcatcatccggatatgctctttttaacttatctatcacgtaatcagtctgaacaagagcaagctttgagcctctcgttcctattaaatacctcattttactctcctacggatcatgccattttccatttatcatttataaatgaacaacaacttaaaatctgtaataccatactttaaactatatttccggaatccttccattatcaatagctgcacacaatatttctttaaacacacgctttctctcggcttgagtgtcatattgcgctattactttttcgcggatctgtcccatgtattcgttcagctcaccaagaaacggagtaagaatctcctgctctttgtctttcagatactgagtcagcacagggctgtttcctccgctcgaaaatgccgcaacaagattcttttcctttatgtatgacggaaaaataaagctgcaatcagccttctgatcgaccgcatttaccatgatgccattagctttgcaatactctgcaatctcatgatttaaagcattgtcatcagtggcagcgataaccatttccatgccgtcacagtctttttgattaaactttctttttataatcgtaattctgtcagctgcatctgaatccgtcttattgttttctatatttgccgtatatgagccctttttatccttgcttgctatatcatcaattgtaagctttctcagctcatcacatatatcctctgccacaaccgtgacctttgcgccaaaatccagcattacgatcaccttgcggtatgccacatttccaccgccgacgatcagacactctctttccgtcatatccacaaacatcggaaaatacgccatttttatctccctgtaataccatatccatactttatttcatatattatttcatgccttattttatactttattatacgctttatgctttattttttgccttatgcttcacactgtatccattgagcattccttcaaaaacaggacgaagcttagcagaaaacactgctgccgatacgcataatataaagtccggtgcaacagttatcagacagtaatccactattacgatgccccagctgacaggtgttgccgcatagaaatttttcatgcagtaaaagtatattgctccaactgtataatatgccaccagtccgaccgttgccggaagaatgagtgtaaacgcattggtctttttaagcttttctgtgatagctccgattaaaaatgctgcaagcacaaagcctaagaggaacccaaagcccggtcttaaaatgtatgtaggaccaccacctgccgcaaatacaggcactcccaccagtccgatgcacaaatatactatcacgctaagcgatgccagctttgccccgagcagaaatcccgccatcagcacaaagaaccactgtaatgtaaaatgcatggtgtacataggaagcggaatatcaatcttgataaatgctccaactgctataagtgccgcaaaaagtgcacatgttgtaagttccttcgtttttaatttcattttcgcgcgctctttcgttttattaaatatacatgctataataacatctttctctaaaaaagaaaagccatcttcgatgaagctgacttttctttgcagctttcgctgcgactcaaaacattaacatatgatttagaagtaatattcatcagaatatattcgtaaatcctctttcgtgacctgtccaccctcgatatgaaacgagttgattacaggattttctgccataagcgacattatcatgtagctcgcatttggatcatatgcaagctttatatcctcatctgatggccttgaagggctagacggatgtgaatgccagttgccaagcggcttaaggccgtttgctctcatgtcctttatggctgccagctgctcctttggatccattgtgaaatgatcctcggcatggtctgtattcgtcaggtaatatacctttgtgatgagacgaccgttttcgtcctcactgcctgctatcagaccgcacgcttcctccggcagatactctttagcatattttgctatttcatccagaaacggatatttcattcttatgatactcatatcgttcctttccttactgtctttttattcctgtgtacgaggtgcatcaaatctgcccgctgtctcctcgcagacctcctgctcgtagtcgattggctcgagaatggtcggatggtcgccacagactgcacagttgtgtgtatcctttggaagcttaatcttgtggaactccatggtgagtgcatcatatgtaagcagatatcctgtgagcagctctccaacaccgattaaatacttgatagcctccatagcctgaagcgaaccgattactccgcccatagctccgataacgcctgcctgcttacatgtaggcactgcatcctttggtggcggattcttgaatacacatctgtagcaaggtccctctcccggcacatatgtcatgagctgacccttgaaacggatgattcctgcatgtgaaaacggctttttctcaagcacacatgcatcgttgattaagaactttgccgggaaattgtcagttccatcgatgatgaaatcataatccctgataagctctctgatgtttgacgcatctacaaacatacggtatgtattgacctgaacgtccgggttcatggcattcattgtctcttttgctgactttaccttggcttttcccacatcggctgttccgtggataatctgtctctgcaggttggataaatctacctcatccgcatccacaataccgattgtgccaactcctgctgctgcaagatacatggctgccggagctccaagtccgccggcgccgataataagcaccttgccctttaataatttcttctgacctttaacacccacctcattaaggataatgtggcgtgaatagcgctcgatctgctcatcagtcattgccattagcatccacctcccatgaagtaaaggaactctacattgtcgccatctttaagcactgtctttggcttatcatctgtggcaacaaattcctcatttattgaaactgttacatactcaggcatatctacattctcaagctcgataagctccggtaatgtaagtccatccttatattctttcttctctcctgctactgtgatagtcattttatttcctcctgtgtcacagattgtggtatctgtatgtgttattatcctgtatcagactgctttatataataatctaaagactataataattcttcaacccatgctttcaaatcggcaggcttttgtgcgccgacctttctgtctaagacctctgcgtcttttacgaaaagcagtgtcggattcgcagtcacctcatactcatcagcgagctctccgtcaaagtttgtgtttaccttgtatacgtgaagtttatcctcataatcatcctcgatatctccgagaaccggtgccagcttcttgcaggccacacatgaatccgagtaaaaatcaacaattaccggaagcttgctttttaatactttttcatcgaaatccgcctttgaaattcttgctgccat

SEQ ID NO: 570 - DNA, 12756 bp, unidentified
  source 1..12756: mol_type = unassigned DNA
atgacacaaaaatcaaaaagcagtaaagtagttactctgattcttatgatcctggcaatgaataccatttatatgttgccatacctgatgtatacatactatacaccattacaggaggctatgggtcttattggaagagatgctgactatggtagattattaaacgtatatggtattgcaaacgttattttatacctgccaggtggatgggtagcagataaatttgactgcaagaagttacttgtattttccatggtttcaacaggtgttcttggtctctgggaagcaacattcccaagctacacaatcctgttactgatccatatattatttgcagtaacaaccgtacttacattctggtcttcttctgtaaaatgtgtcaacatgctcgctgaggatggagaacagggcggtatgttcggaagcctggaagcaggacgtggtgtttcaggtctggttcttactattatctttacatctatttatgcagtaaatgcagctgacagcacaaaggcaatgagattaaatgtgtcaattatctcagttgttatgatcgtgatcggtattcttttagcagttttaatgccgaagccaaagaatacagaaaatgcaacaaatgctacattacttgacagtatcaaagcgatgggtgttgcattcaagtgtccagttacttatctgttagcaggtatgatcttctgtggatctatgtgtcttgcatctacaacttattttgcaccatacttacagaacatttgtggattaccggtaaaaatcggtgttttatattcaaactacagcaagatcgttacacagttaatcgctgcatctgcagctggtattttagcaactaaattaaaacgttccacaaaacctatgatcgtagccggtgttgttggagcaggtttatatattgttatggaaatcttaccagcatctacagcagttatgtggccaatgcttgttgtaatgacagttgctcttatgatgatctatgtattccgtgctctgtattacgcaacagtagatgaggaaggaacacctaagaacatcgttggtagtgttatcggtatctcatccttaatcggattcattccggatacattctacacatcattatgtggtaaatggctggaagctgatcctgtaggtggatacaaaaagatcttcttaagctgtattttggctatggtaattggtcttgtttgtgcatttatttccgatagaagaatcgtaaaattccgcgcagcaaacggcaaagagaactaataaaagagaaaaagagagacgtattaaaagtataatttatacttttgattgttaaaaaataaacagagtgtcccggagaaaggacactctgtttattttttatgtaataggatgatgttggtgtcaaaaggtctactccgtaaccttttgacacccgaatcgtaataggaaaatttagctctattacatagaaaagcgtttttaggggtgaaaaaagagagatataaaaaaaagtgtttttaatatctctctgctaagattcttcgtcaaaagcctttgataatattttaacatattcatgtaatactttacaaaaagcattcatttcaccgatagagcagaccttcaacagttctgactgcatcgaggctgttttttttgtgacaaaagcgatataaagggtattcagacgttcaccgtccggagtagtgtatagatgcactacttttgcattaccgggacgcttttcgcggtaaatgtagccacctttttctaggttggaaacaatggatgaaatagttccttttgtccgatgttgtttttgggataaatcacttacggtaatccctggattttgttcaatcgtagataagatagcgacttcgacagacttgatcggacgatcattaccgtagtcacgagttccattttgcatatctgtgaacagcatagcgaacatggaaagatcactggcataggcgatgagattcgtactatccttatcccctgtattgtaatattgtaccatgtatgcggtacctccttgaatgattgcatatcagaataataatgatatatatatgtaatatatcatgagaaaataggaatgacaaggaaaaacggggaaaaacagggaaaaggacagaaaaacatttctatacaagaattaattccaggatcaatacaaccgtacagcagccgacagatacttgaaacagacttgcgccaaaccatgcaccgatcatcccaaaaacgagtgcgatagcacctgcaacaggactttgtgttgcttcgatgatcgcaggaaaagtcatgacggataacgtaatatatggaacagaatataagaaagactggataaattgatttttgatcggttttcggataagagtcagaggaagcacacgggtcgtgtaagatacaagtgccatgacagcaatataaaaataagggttgtgtgtcataaaaaaactcctttcgatagtgaagacagagtgaaatatatgtaatgtttcaatttaggtagttgcatttttatctttttccggggtgaccgggaataggatcgcagcagcagaagacaggatcaccgtcaaaagaatggtctttgttccacttgaaagagaacgggttcagatagccggggcgtgcaattgtgatcccaaacagcttgtcggtcacatcataggcgataaaaagccgatggataaaaggggtgtcttccgagaagcgttgtgcaagtgcacagctcatcaaaagataacgggcattggagattagcgtgatgatcgcaacttcaagataagtggcatttgctgcgatcagtgtaaaagcagcatattcacctgctgaggcgttattgaggaggctggcaagaaatccctgtaaaggattcagaccggcattccttgtggcgattccaagagaaaaggataccgcaaaataaccgagtgcgatcggaaatccgtcccgcattccttcggtgaaaactttccggctgaaagtatagaccggatgttggcttgttttgaatgtctgtatattgtgattcataaaaattctcttttcatcaggttgttaatatcaaattaactatgtggaagagatgatggggaaatttgaaaaagataccggaacaggcagatttttcaaagattttaagaaatatcatgggcttccggttcaggatgccattttctttaaccagagtgatctgatctgtgatatggcaaagcacgaggactttattgttatgggaagatgtgcggacgttgtactcacgaatcatcatatcccacatatcagtattttcatcacagcatcgtttgatcagagtgtacgccgtatgatggaaataaacagcttaaactacaagcaagcggaacacctgttaaagaagttagataaacgccatgaacgttattatcatgcatacaccggtaaaaaatggggtgatgcggtcaactatgatctgtgtattgacagtgcaagttacggaatcaaggaatcggttgagctgatcgagcgtatgatcaataagtatccgaatagttaaaaaataatttcatatatgtaaacacattgcacaaaaagtagtgttttttttctacactttagactctaaaatatattgactttagtttctaaaacgagtatgcttttattaagataaaaaatatttcatttaaggagaaaaaagtatggcaaacaaagaaatcaaaacagagcaggcaccggcagcaattggtccatattcacaggggatttcagctgaaaacatcgcatttgtatcaggacagctcccaatcgatcctgcaacaggagagtttgcaggtaacgacattgcaagccagacacgtcagtccctgaaaaatgtgcaggcaattttagcagagaatggtatgacgatggcagatgtgacaaagacaacagtacttcttgctgatatcgcagaatttgcggaaatgaatcaggtttatgcagaattttttgcagaaccatttccagcacgtgcagcatttgaagtagcagctttaccaaaaaatgcgaaagttgagattgaggcaattgcagtaaaaagataagaggaaaatgaagatgagcgtagattttaaccgtgaggtcgatcgtagaagtacaagtgatgtgaaatggcgcccggaaggattaaaggggtatcttccgatagaagtttcggaaaatgagatcccgatgtggatcgcagacatggattttgcatgcccggagtgcatcgtaagagccatcaaagaaagagccgataaagagatttttggttattgctcttataagcaagagtattatgatgcattaacctggtggtttgataagcgatttggaatgaagatccatacggaccttgtttccatgatgccgaccgttgtcagtgcgatcaatgttgcaatccgtgcattcagtaatccgggagataaagttattattcagcaacctgtatacgatccatttgcagaactgatcaagaaaacaggaagagtaatggtgaacaatggcctgatctgtaatgatggactatatgagatggatttcccactgcttgaagaacaggcagcagatccggatgcgaagattatgattttatgcagcccacataatccggtgggaagagtctggacaaaagaggagcttgcccgtgtcggtgagatctgtaaaaagaacaatgtccttgtgatcgcggatgaaatccacagtgatcttgtatatgcaggatatgttcacacaccgtttgcgctggcaagtgatgcaccgcatctggtgtgcacatctcttggaaaaacctttaatgtagcaggacttcgccttgcgaatattttcagctcttcagcagaactgaaaaaacagtatgatcaggagattgatgcttattcatacagcgcatccaatacatttggtttggagatggtacaggcggcatattcaccggaaggagaggcatggctggaagaattattagtttaccttcagggaaatgtggaggttgtttcagagtggtgtcaaaagcataatgtaggatttacagcaccgcagggtacatttttatgctggctggatcttgccagtgccggactgacagacgaagagattattaagaagattattatgggaaaagaagtgatctgtgtaccgggaccatggtttggcaaaggcggcgaaggttatttaaggctgaatattggcggaatacttctgcacagggttctccatcttcagaacaacgctggtagaggctctggatcggatcgcttctgtattagataactaatttcagaaaagaacataaatgcagctttgtagaacaaaaggaggagggtttttatgctgacgaatgaaataattcgcctgcaggcagaagcacagcaggattatgtgattgaaagccgacgtaccattcatcgttttgccgaagtaagcggtaaggaattcaagacaagtgcttttattgaagaagagattaaaaaagccggtctgccttatgaaaaagccggtgataccggttggatcgcaattcttgacacagggaagccaggatcacgtattgcgctccgggcagatattgatgcgcttctggtaccggaggagccaaataaccttgcaggtcctcgtgttgtagtgtccgatgacccacatacgagtcatgcatgtggtcatgatgcccatacagcaatgttattaggagctatgcgtgttcttgcagagcaacgtgataatctggcaggcgtgatctatttctgctttgaagaaggagaagaggatggcagaggaatattggctatgttaaatcagctcagcgcccatggtgtggacgtttgctggggaatccatgtgtatgcagggcttgaatccggaaagatttgtgttagtgccggtccacgaatggctggtgctgcgggagtcggcattaaggttatcggcagagggggacatggctccagaccggatatgtcggtaaatcctgtattttgtgcagcctctattctgaccaatacagcgacggcctgggtcaatcagattactgccggaagaacggttacgttaggtgtgaccagtatccagggtggtgaagcaccaaatgtcatcccggacacagcggatatacttggttccctgcgtttcttcaatgatgaagaaggagaaaaagctgtccgaatctttaagaatgtagcagagcatacggccgcaatgaataattgtcaggtacaatttgatgatcgtttctgtgttttatgtgcgccagtgatcaacgatgagtattattcaaatcttatttccgctgcattgccggaggtacttccggagaacgtaacggtttcctcttgtgagccatggtatgcatcggagtcattctcctgctatcgaagaatttgtccgagtgtactggcacaccttggaattaataatccgtcctacggttcgggtgcagcacatcataatggtttctttgatgtggatgaaggagtattatctaccggtgtgatctctacactgaagtttgttgcaatgctgcaaaaataaaaaatcatacgcagcaaaatagcaagtgctttactgctgaatgaacattaacttactgccgtaaaatgtttccttgcaatttttggaattgtctgcaataattctatatgcggaggggatagagatgaaggaacagcgtatcaaattaatcggaaagttattacatcagcagggaaatacagcaagagcttttgtacagtatatggattcagaccgtgagtatacggcaggtgataaactctacatgagagaggcacactttgtgatcgcgatcggtcccggtgaaggacgtactatgtctgagattgccagagagatgaatgttacacagggggcagtttcgcagatcgcatcacgtctggagaagaaaggatacgtctgtcgcaggaagaatgaagaaaacaaacggcagatcattgcgtttctgactgaaaagggagagcagttttacacagagcaccagcgatacgacgaaagtatgcacaggcagatggatgagatcgccctgaacaggttcaatgaggaagaactacagtgcatctttgaatatgaacagatcatggaaatgttgctgaaagaagaagcgcttacgcggcatttgacagagaaaagtaaaaattaaaaattttgaagaaaacgaaaaagagccggatatctgaattttgagatttaatctcataggatatggaaggctctttttttatgaaaggattcgggtgtcaaaagattttttacgagatttcatgtttcttccgctttgaaagcgtccaatgcctacaaaaagaaaggcgttccagtaatggaaattttccagtatttgtttctgctgattttttctaacagaagcatgtacatgaaactgatcacaggacggaacactcttgattttgcgaaggatactgtatatcgttttatgaaaatgattcagattaactggatccgtttcacaacaatactttcaacccgaatcatcaaggatgccattcttcctttggattctgaggatcgtgcaaatgttcttatcattgatgattgccagactgaacttcagacagcaggagccgactcatattatggagaacattgtttataatgagctgcttgtgcgtggttacaatgtggatgtcggtattgtggatgtatttgcaaagaatagtgagggaaagagggttcataagcagttagaggttgattttgtagtgaaccaggggagtcagagatattatattcaggtagcttatgatatgacttctgaggagaagcagacacaggaacttaattcactccgtaatattccggattcatttaagaagattattatagtaaatggaacaaaaaagccttggagaaatgaggaaggatttgtaatcatgggcatgaaatattttctgcttaatgcagatagcttggggttttagtttggaaggagataatatattccgattatagaagatatggatataaagttaaatccgattttccgggagacttacacgcttggggatgtcggtgtaaaggagaagggatatacatcacggaagcctgcatgggatgcgacgcctgcgcggcagtatgtccgcagcggtgcattgaggagggcgcgccgtaccggattcatcggaatcattgcttccgttgcgggaactgctgtgagaactgtccctcgcacgcgattgagcgaaaacgagaaaaaacgattagtcgtacatatcacgaaaaaatgaaaatgccagaaaattcatgcttaaatgataaaaaatgcgaataataataaaaaatgttttcattgactaacagatattgaggtacttacaatgggaacaaaaggagggggtttttatgtatgcattgtcaaaagcacaggcaggagatatatgtacgatcaagtggatgttcgggctgccggaggcagtcgattttctgcgccagcatcacgtggaggagggagagaccatacaggtcatccgtaagctgcgggacagtctgatcataggggtgcagaatgagcgggtggcgcttggaaaagaaatcgcagaccgcatacaggtttaaaaagaaggagggcagagcacttgttgcgctgctctcctttttgtgtaataggaacgaagtttcctattacataaaaaagtctgtcttctggcaagaaaactggtcataccagaatccagatggcagattgcacaaaaacagaaccgtaaatatagtgcaaaatagcgttgatttcacagaaaaagtgtgttaaaatttagacaaacatgaggtatgaccagaacgcaaccgaacaaaggaatacctcggcacagggaaaggggcatacgaatgagtgagtttaaggtgattgaaatcaagaagaacattctggaagacaatgacagagaagcagatgtgcttcgttctgagttaaaggcagacagaacatttcttctgaatctgatgtcttcaccggggtctggaaagacgaccacgctggtgcggacgataggcgcgttaaaagacgagatgcgcattggagtcatggaggcggatatcgattcggatgtggatgccgacacgatcgcacagactggcgcgaaggcaatccagatccatacgggcggcatgtgccatctggatgcggacatgacgagacagggcattgagagcctcgagacaaaggacgtggatctcgccattctcgagaacgtcggtaatctggtctgccctgcagagttcgatacgggagccgtaaagaacgccatgatcttaagcgttccggaaggggatgacaagccgttaaaatatccgttaatgttttccatctgcgacgtgcttttgatcaacaagatcgatgtacttccatactttgattttgacatcgaggcatgcaaagagcgtgtgaagaagctgaacccgaacattcagatcattccgatctcttcccgcaccggcgaggggatggatgcgtggtacgactggcttcgcacagaagtaaaacagtggaataattaaaaactgccggaagcggcatacatattttatgggtatacacaggctatgagtatgcgcactcttagagtgcgcactatttatgcaaatataagacgaaaacagacgagacagaataaaaaaacaggaaaaacaacgaaaaacgaaggaaaaaggagactgttatggcagaagaaagagaactgattttaaagctcgggaaaaagattaccgaccgtattccgtacaagcttggtatggagaagctcacggtaaacgatccggaatactggggtcttgcaggtgtggttaccgatgagatggcggaagtggcactgtgcatggacgtgcgcaagccgattacccttccgaagctggcaaagaagaccaagaagccggaggcagagctggagaagctgttgcaggagatggcggttgtcggaattatcgagtacaactgggagaatccgcagcatgagaagcagtacattctgccgatgtatgtgccgggaagcgccgagttcatggtaatgaacaaagagcaggtggaaaagcacacagaggtcgctgatttcttcgagaatatgtcaagacttccgttagagaaggtgacaccgatggtgccgctcggcggagccggtatcggtatgcatgttatcccggtagagaaggctattccggcagcacaggaatctgcagatgtggagcatatttcccactggctgaaaaagtacaaggacaagtatgcaatcggacagtgttcctgccgtttgcagcagagagtccgcggagagggaaccggtgatattgagggcgagtggtgcatcggtgtcggcgatatggcagatttcctggtacagaccggaagaggccactatgtggagcttgacgaagtgttagagcttttagagcgcgccgagaagatgggttatgtacatcagatcaccaatatcgacggcgaggataagatttttgcaatctgcaactgtgcagtcggcgtctgcaacgcgctgcgcacctcccagctgttcaatacaccgaacatgtcccgctctgcataccgcgcacatgtgaccaaggaaaactgtgtggcatgcggccgctgcgtggagtattgtccgaccggtgctgcaaagctcggacagaagctgtgcacaaagaacggtgagatcacttatccgaagcaggaacttccggatgcgacaaagtggggaccggagaagtggagcacagattaccgtgacaagaaccagatcaactgctatgagaccggtacagctccgtgtaagactgcctgtccggcacacgttccggtacagggttatgtgaagatggcagcggaaggcagatacatggatgccttaaagctgatcaagaacgagaatccgttcccggcagtctgtggttctatctgtaaccgccgctgtgaggatgcatgtaccagaggaacgatcgatcaggcggtagccatcgatgagatcaagaaattcatcgcagagcaggagatgcatgcggataagcgctatatcccggagattgtcaaccatcttggaaccggcgtggatctgccgcagaagattgcgattgtcggcggcggcccagctggtctttccgcagcgttttactgcagaaagatgggttatccggtaacggtattcgagaaagagtcccgtccgggcggtatgctgttaaatggtattccgtcgttccgtctggagaaaaatatcattgacgcagagatcgaggttctccgccagatgggcgttaccttcaagtgcggcgtagaggtaggaaaagatgtgacgatccagcagctccgcgaggaaggcttcaaggcattctacgtggcaatcggtgcacagggcggacgcaaggccggagttccgggcgaggatgcggatggcgtgaagactggtgtggaattcttaagaagcgtgaacctggatgagagcacaaagctttccggtcgtacggttgttgtcggcggcggtaacgtggcagtcgatgtggcaagagcagcgctgcgcgcaggttccggtgaggtttccatgttctgtctggagtcccgcgacatcatgccggcggcaaaggatgaagtggcagaggctgaggaagagggcatttccgtaaacaattcctggggtccgaaggagattctgacagagaacggaaaagtgaaggcaatcgtcttcaagaagtgtctctccgtcaaggatgcggacggacgtttcaacccgcagtatgatgagaatgatctgatgaccgttgagtgcgagaacgtgctgctttccatcggacagtccatcgtctggggagatctgttaaagggaacaaaagtggagatcagaccgaacggcggagctatcgctgacccggtaacctatcagaccgcagagccggatatctttgtcggcggtgatgtatacacaggaccgcgttttgccatcgatgccattgcagcaggaaaagaaggatttgtatccatgcatcgttttgtcaatccgggacagagcttaacactcggacgtaaccgcagagagttcatcgagctggataagaacaacatagacgtggagacatttgacaacgcaaaacgccagattccgggcacaaaagccggcgtggcaaaggagacattccgcgacttgcgctgcacactcaccgaggagcagatcaagacagaggcaaagcgctgcctcggctgcggagcttcggttgtggatgagaataagtgtatcggctgtggaatctgtacgacgaagtgtgagtttgatgcgatccatctgacacgtgatctgccggatgcaagccgtatgtggaagtctgaggacaaactgaaagcaatcgcaccgtatgcgttaaagcgtcagtttgcgatcaagcgcaacaagaattaagaggagtcatatgcacgagctgggaattattgttcatatcgcaaagacgctggatcaggttgcagcggagaacgaattaaaaaaaattggatctgtcacgttggacatcggtgaggtcagcggcattgtgccggaatatctgacggagtgttgggaattttaccgcaaaaagaatccgctgatcgcagagtgcgagatgaaaatagagtcccttccggcggtcacaatctgtgaggactgtcagaagacctatgagacggttacttacggaagacagtgcccgcattgcggaagctatgaaacgtatcttgtgaccggcaacgaatgcagtatcaaggagatcgaagcctgctaa

SEQ ID NO: 571 - DNA, 7216 bp, unidentified
  source 1..7216: mol_type = unassigned DNA
ctaatccttaatcccttgtttcaagtattcgtaaaagctatattgcgaccgtaccttctccttttgcggtcgtgacgacttccagcggtttcgcaaccggtcgtccacgaagcaggctttccgtttgtccgacagttgtatggatagcatatcgatgagctcttgcttcaagtccgggtccagaatgggggtgacggcttcgatacggcggtacaagttacgccgcatccagtccggcgagccgaggaagagcttgggtgcgccgccgttgccgaagtaccacacacgggcatgttccagaaaggtatccacgatgcgtgtcacgcggatgttgtggctgtactcctgcccagggatgaggcagcagatgccgcggacaatgaggtctatctctacaccggcttgcgaggcttcgtagaggcggtctatcatggcggggtcttgcagggcattcatttttaggataatccgtccttgcttgccttgccgggtcagttctatttcgtgattgatgaggcggttcagttcaggaatcaggttgaagcgggccacaagcaggcggtggaacactggattttcctttccctgcagagtacggaacaagttgtgcaggtcgtttacaatcaccgggttgcaggtgaatagtccgctgtccgcatagagggtggcggtcttttcgttgaagttgccggtgctgatgtaggcgtagcttgtcagtttgcgcccttccttgtcgcggcgtagcacgagggctactttggcatgtacctttagtcctggtatgctgaaaatgatgttgatgccggcggctttcatcatctcggcggtggcgaggttgttttcttcgtcgaagcgggctttcagttccacaaagacggtgactttctttccgttctgtgcggcggctatcagggtgttgatgacggtggagttctctgccacgcgatactgggtcaccatgatttcacgcacggtgggttcgtggacggcctcatatagaaaatggatgaagtggtcgaaggagtggtagggataatgcagcagcaggtccttcttctccacatagcggaagatggattcgcgttcgtccaggcaggtcagcttcatgggctggggtttcttgatgggacgtacgctttggttgggattgggcagatgccgcaaatcctccatgttgaggtgcttgtctcccggcaccagctcccggcggtctatgcggtaggcatctaccagaaagtcgaggaagtcctggggcatggcgcggtcgtatacaaaacggcacacggcgcctatcttgcgtttctttaccttcttcttcacctgctcgatgatttcggaggtattggcggcatcgtctatcagaatatccgcatcgcgtgaaatcttgatgcaataactgctgtccacttcataaccggggaagatggtatccagattggccttgatgatgtcttcaatgaacatcagataatagtctttccccaccttgggcagctggatgaagcgcggcactttgctgtacggcagtttcatcacgaaatactggatgcggtttggagaactggcgggagctcctttcagatgaagccgtacggccagatagagacggttgtcgcgcaggaatgaaatcaccttgtccttgcttacgggcaccggggccagataagggaatatctcttcgcggaagaagttgcgcacgaagtcgcggtgaaacggttctacgttgcggctttgatagaatatgatgtgatgtttccgcagggcgggcagtatcttctgttcgtagatgcggatacgttcctccagttggcggttgacttcttggttgatttcatctaccagttcggcggcagactgcatagtctcttcatcgctttgcgaggctccggtggctatggccttatggtcggctacgcgtatcttgtagaattcttccagattggaagagtatatagaaataaagttgatgcgttcgtatagcggcaatgtctcgtcttccgcttccagcagtacgcggtagttgaaggaaagccagctgatgtcacgtttgaaatatctgttgtccatggtgttaaggtgttaatgtggcatattagcacattaccacattgtattcttcccaaatataattacctttgtcttaataaacaaaggaaagatgacaaaagttggtttattatcggatacgcatggctactgggatgaaaagtacctgcaatattttgagggctgtgacgaaatatggcatgccggtgacatcggttcgctggaagtggcacagaagctggcggctttccgtcccttccgtgccgtgtatggcaatattgacgggcaggagatacggcagctctatccgcagattctccgtttcacggtggatggggcggaggtgctgatgaagcatatcggcggttatcccggcaactacgacccttccatcaagggcagcattctggtgcgtcccccaaagctgttcatcagcgggcactcgcatatactgaaggtgaagtatgacaagacgttggatgtactccacatcaatccgggcgctgcgggcattcaaggtttccataaggtgcgtacgatggtacgcttcgcggttgatgggggaacgtttaaagatttggaggtgatagaacttgctgaccgatgatgtagtttgtttattttcaatggattgtatttaccgattgcttgcgctatagtgtaaaagccgttacatgctaatgtaaaggttgttacgctattgggtaaaggccgttacactatttggtaaaggtcgttacacgctgaggtaaagaccgtttcatcaaggggtgacggccgttacgcactgaagtaagcaaaacaatgtaccggagtaagcaaagcaatgaagtaaaaagatgaaaccaagccttcacttaatcgaatttttccattatctttgtacccgaatagcaagtagagccgtggggcatcgtcctccttcttattttattctccattttgaagtatcaccgaaaaagaactgaaatatgaaaggaattattcttgcaggtggcagtgccactcgtctctatccgttgtccaaggctatctccaagcagataatgcccgtctacgacaagccgatgatatactacccgctctctacactgatgttggcaggaattcgcgaagtgcttattatctctactccacgtgacttacccatgttccgcgagctgctgggaaccggcgaagaactcggtatgtccttttcctataagatacaagagaatcccaacggactggcacaagcctttgtgctgggtgcagagttcttggacggcggaccgggctgccttattctgggcgacaacatgttctacggtcaaggcttctccgccatgctgaagcgtgccgcttccatagacaagggtgcctgcatctttggttattacgtcaaggacccccgtgcctacggtgtagtggagtttgatgccaacagcaaagccgtctcgctggaagaaaagcctgccaatcctaaaagcaactatgccgtccccggactgtacttctacgactccaccgtgacagagaaagccgcctccttgaagccctctgctcgcggcgaatacgaaattaccgacctcaaccgtctctatctggacgagggcacgctgaaagtggagctcttcggccgtggctttgcctggctcgacaccggcaattgcgacagcctgctggaagccagcaattttgtcgccaccatccagaaccgtcaaggcttccgcgtgagctgtatcgaagagattgcctggcgcaagggctggatagatgtagaccagctgtatcgcttgggtgaacagcttggcaagaccgaatatggcaaatacctgatggaactggctgaatcgaagcgatgaactctttgttccccaaaaagagaaggagaatagttctcctataaaggcccgctgactttaatttttaatttataatttttaattctcatgaagacttatctcgtaaccggtgccgccggttttatcggcgccaactatattaaatatatcctggcaaaacataatgatattaaagtggtgatactggatgccttgacctacgcaggcaatctgggcaccattgccaatgacattgacgatgaacgttgcttttttgtaaaaggtgacatctgcgaccgcgtgcttgccgacgaactgtttgccaagtataaattcgattacgtagtgaattttgctgccgagagccacgtagaccgtagcatagagaatccccagcttttcctgatgaccaacatcctgggtacacaaaacctgctcgatgccgcccgccgtgcctgggtcacgggtaaggacgagtccggttatcccacttggcgcaaaggcgtccgttaccatcaggtgtctaccgacgaagtttacggctcacttggtgccgaaggctacttcacagagcaaaccccgctctgcccgcacagcccttacagcgccagcaagacgagtgccgatatggtagtgatggcctatcacgacacctataagatgcccatcactatcacccgctgttccaacaactacggtccttatcacttccccgaaaagctgattccgcttatcatcaagaatattctcgaaggcaagaacctccccgtctatggcgacggcagtaacgtgcgtgactggctctacgtggaagaccactgcaaagctatcgacctggttgtccgcgagggtgtggaaggcgaagtctacaacgtaggcggtcacaacgaaaagaccaatcttgaaatcgtgaagctgactattgccaccgtccgccgcttgatggaggaagaaccccgttaccgtacagtgctgaagaaacaagtaaaagccgccgacggcacgattgacatcagctggataaacgaagaccttatcaccttcgtcaaagaccgcctaggtcacgaccagcgttatgccatcgaccccacaaagattaccaatgccctgggctggtatccggagacgaagttcgaggtcggcatcgtcaagaccattgaatggtacctgaacaaccagccgtgggtggaagaagtgaccagcggtgactatcagaagtattacgaacagatgtatggaggtaggggttaaggtttagggattagggtctaaccgctaatccttaacccctaacctctcaattcagcgccaccgctaacagtaatcctaagaacagcatattgcgcgacgtctcgcccagtatgctgttcagctttttaccgctacctatctgtatcattttgcgccacgtcagtgcgtgcatatagagatagacgaagggagcccagataaattccagtggagtcagcttgcccgtgtagacaaaccagaagcagagcagcacggcggcgatgcccagtgccagatacatattctcaccgaacttcttgccgtagcgtaccaccagcgtacacttgccgcttacggcatcctgctcgcggtcgcgatagttgttcaccatcagcaaggtgtctatggcgaggccactgacgagcgacagcaccaccacatccatattcagcgtataggcctgcacgtagtaggtgccgcatacgggcacgaagccgaagaacaccagcaccagtacgtcgccccagccccgataggagagcagcgtggtatagaggaaagcaaacagtatgcacactacgcccagcaccaccagttcccagcctccgtggggcagctgcccccagacggtgaacagcactgccagccctgccaggcacgacagtgtcagtgcgatgccgatgccggttttcatggctgccggcgtaatccaaccttcggcgcaggcgcgctgcggccccagccggtcttcccgacggtcggtccctttctggaagtcgaagaggtcgttgataaagttggcggcaatctgcatgccgcaggcaaagagggcgcacagcagggcgggtgcggtcttgaactgtccgtcgctgaaggcaagggcactgcccagcaataccgggatgatggctcccgtcaacgtcttggggcgggcggcgagaaaccatgcgtagggtgaattctgtttaatctcgttcatcgtagttccaatttagttcggcatctgccagcaaaaatactgaaaatccctatatttgtacccacttatgatgaagaagttagtctacatatccattctttctctgctgctcttgtcttcctgccgttccaagcggatgattaccgtgtcgttgccgcagccagtcatgcaggcagacagcacgcagcttggcgatactatcgggttgcctgcccgcctttcgccgatgttcacctttgaccagtctgatttgcgtaatgtccgccgccagccggcgaagggcgaggtaaagaaacagcagataaagaaaacggcaccggtacaaaaggtaattgtgcagcgaggtacgagaatcacatcgaaaaccacccacgtaggctcggcctataagggcgtcagccgcattaagacgtacgacttcacgcatcgcgacgtgcctgccgccttcgagggcttccgcatcgcctttgtctccgacctgcactacaaaagcctgctgaaggaggagggattgaaggacctggtccgcctgctcatagaccagaaggccgacgtgctgctgattggcggtgactttcacgaaggctgccagtacgtgccgcccgtcatggctgccctggcgcaagtgaagacgccgttgggcacctatgccgtgcttggcaacaatgactacgaggcttgctatgacgacatcgtgcgcgaaatgaggcattatggcatgcatctgctggagcataaggtggacaccctgcggcgtggcggtgagcggattcttgtggcgggcgtgcgcaatcctttcgacttggccaagaacggcacatcgcccacactcggcctttcgcccgacgatttcgtaatcctgctgacgcatacgccggactatgccgaggacgtcccggtgacaaactccgacctcatcctggccggacacacgcatggcgggcaggtgacgctgttcgggctttatgcaccgatagtcccctcgcactacgggcagcggttcctctccgggctgaagtacaactcaaagaacatcccgatgattgtcaccaacggcatcggcacttcgcagaaagccatccgcatgtttgctcccgcagaggtggtgatgattgtgctgcaccggctgacggactga

SEQ ID NO: 572 - DNA, 11278 bp, unidentified
  source 1..11278: mol_type = unassigned DNA
tcatactatctcacctgccgtttcccgatagatttcaaagaacttatcctcaagtggcatttccgccgtcacatgggaaagcgtgtcacacaaaaccatttttccgttgatgataatgccgacacggtcgcagatcttttcgatcagtgaaaaaatatgtgttgatacaatgatcgtttttccttctgctttcaattcctgcagaaaatcggtcacaactttcgccgtgataacatcaagtccgtttgtcggctcatcaaaaataatgatctgcggatcatgcaccagtgaaatgatcagggatactttctgtttcataccggtggagagatttgcaaccttcacttccgcaaactcatccacaccaaatttctgaaacaggatacgttttctctcatcccgctctgcctgatcgacaccgtataattctgagaaaaaatcaaacagatagttcggagtaaaaaattcttccagttttaattcactcgtcagaaatccgatctttttccgaacaccgttcggatctgtcacaatactgcttccgtcaatcagagcatcacctttatccggtttgatcagcgttgctaacatgcgaagcgttgttgtctttcccgctccattgggccctaataatccaaaaacttcccccctgtaagtacaaaaggaaagatcatccaccgcaaccttaactttttccgttgtcttttctaatttctgctgtttttttgacaagtgaaatgtcttggataatccactgactgtcaataactcttccataaccctctccattaaaaatttctatatcatgatcgtgatctacactcgcttcgctcggcagtcttattatatcgttccgtcatccatactgtcttcaatatcatcatagatatcatcgtaaatatgatcatagatgtcattatagctgctataagatccaagtcctgtaaaaaaaatcaggatatacagaataatcgatgctgcaaaaccgattccacctgtgatcaaaccaacgatcgccattccttttttgtttccttttaccagctgtaaaataccgaaaatgattgcaaggataccggtgatccagctgatacaagtgcagaacagcaaaacggtgatgattccaagtatcaacgacgcaataccaaatccttcactttctgacttgttattgccatttggctgtccataattataatctgtactgccgtttgactgtccatagttataacctgcactgtcatttgactgtccgtaattataatttgtattgccgtttccatatgacgtatttgtataatacggattgtctgtcatagtcttttctggatttacacgctcttcatttccggtcacagtcttctctaaatttacacctgctgtaccatcagtcgtacttttctccaggctgacaggatttccctgatttacattcggctcatcatttccataattccagttattttcttcactcatactctcactacctcttaattaaatccgaccactttctgtgacagtcgatatgccgcaaccgaaatctttctgcctcccttgcccggcagattcattgcatttcccataattccggcgcgcagatgatggaataaacggatgtcttgatccttaatatatttccacagttcacgttttttcagaagattttcctcagtgccggagcggatcagcataatcgtggaaatgaccgtgatgatttccagataattaaacatgtaatgacgcagttttcggtttggaatcttccagagatcaaattcatctaccataatcttatttacattgatctgctggtcgatacggctgatcatcactttctcattgaccgactgatcttccctgccaataaagtaacggtaaaaatctacatccatataatacagtgtttttacacttggtaatggtttgtacacataaatattatccacataaaatgtatgtttcggcaactctaatccacattcacgcagcagttttgtacgataaatcacagaatgcatcaaaatgtactgaccctttctgaaacgtgacacatcattccaggtaaaaatctgattttggggcaggttcgtgtagtgcatcacttttttatgatgcgcaccttctttttcatatacataattggcaataaacatatccagggtctgattgccgccggtcagctcacgaagtttatctaaaatcttcttataagcctcctcatctacccagtcatcgctgtctaccactttaaaataaagtcctgtcgcattgcggattccagcattgacagcctctccgtgtcctccatttacctgatggattgcacggatgattcccggatatttcttctcataggcatctgctatgtcaccggtgctatcttttgacccatcatcaatgatcaggatctcaacatcatcgccacccggcagcagggatttgatacagttttccatgtaatcctgtgaattgtaacacgggatcgcaaatgtcagtaatttcatatatgaatcctccgattatctttttgtattttctgccatgatcgcatcagcaagttccatcgcttttttcgtcatcgcatcgatattatagtatttgtattctgccagtcgtccgagcagataaaaatgcggcagtccacctgcaagcgcacgatatttttcatagagttcctggttctttggctctaatatcgcatagtaaggaatttctccctccgctcctgtgtaggcaaacggatactctttcacgattgtggttccgtccgtgttcttttgtccggtcagatacttaaactctgtgattcttgtaaaatcctcactgaccgtgtaattgaccacgctgtgtccctgataagattctttctcataatgttcaaagtcaaatcttaaggaacgatatggaagccttccaaactgacagtcaaacaactcatccagtgcgcccgtatagataacctctccgtcaaacggtgttccatcaaaataaatctgattttcttcaaaacgcaatctctctttacagtcaacacctgtctcaaccgtgatgttctcatggtctaacatgcgctcaaacatcggtgtgaaaccttccttcggcactccctgatatttgtcctgaaaatagcggttgtcataagaaaccagcaccggcacacggcctgtcacttccgggctgatatcctccggtttttgtccccactgcttcatggtatattttaaaaatacattttcgtacacaaactgtgcgatctcgcggatgtccggatcttcattttcccgcagtttcatgatcggcacgcggcttccctctccgtatgcagcaatcagtttctgctctaatgcatctgctttttccttttcatataccatatgaagcgtatttaaattaaacggaaccgggatcagacgatccccgacctttgctaccacctcatgtccgaatacataccagtccgtaaatcttgagagatactgatatacttcttctattcctgtatgaaaaatatgtggtccataattatgtattaatattccatgttcatccggctcatcatagcagttacctccgatatgactgcgtctctctaaaaccagtactttctttcctgcttcctctgcaagctttctcgcactgacagcacccgcaattcctgcgccgatcacgatacaatcgtacatgtaatcctccttgttttccactttgttttaccatagccattctattatacacattttcctaccgcaaaccaatcaaatttttctttagatattcttaatttctgccaaagtatgtagttgttcatattttatttacataattctcacaaacagggcatacggcggtcacaattccccgatatactaaattcaaagttaaggcaacaagttaaaatttttcatagaactttttttcatacctgatgtaagtcaggtagccttgcttatccgataagcaaggttcctcccagcaaatagtgaattacttcacttttcatacacactctttttcataatgaatagccggtgctgttgcaccggctccctctttttataaatattttcttttaagctttcttttcatttccaagaagaatgttcatatatttcgcatacgcagcaaaagcggacggaatagcatatttttcttttgcatcttctgcttccacaaataataatccatctgcacgatttttttcacactgcacctgtggatgcatttccggctcctctacacggactgcataacctgtcatgtgccattcgatatgggaaaaaatatgtttcgcctcacctaacggctgaatacggatcggtgcataccccatctcttttaccatggaaagtacttcctcctgtcccatatttccttccacattcggaagctcatacagtcctgccaaaagtccctttgccggtcttttccggattgcaaccttctcatcatcccttaaaatcagaaccgtttttttctcgatctttcgcggttttgccttgctcttgactggtatctgtccgatcagttcctgtttttttgcctcacaaaaatccttccatggacattcggtacaaagcggtgcaccgtttggcacacagatcgttgctccaagttccatgagtgcctggttaaacgcaccggcaagattctgatgatatacctttgccctcagatcatctgcatcctccatccatggaaatacatttttttcatttctgccgtctgccccatgcatcaatttttctaataatttttccatctcattacggaatgactgtttcatgatatccgtatcatccgcagaaacgcgcgttaaaacacggagcacatttccatcgaccgccggaaccgggattccgtatgcgatagatgcgaccgctcccgctgtataatggccgatcccctttagtttcaacagtttctcataatctgccggaagttgtccaccataatattccacaacttccacagccgctttttgcatgttcctgacacggttataataacctaacccctcccaaagctttaaaagttcatcctccggacacactgcaagtgcctttgcatccggcagtgccgtggtaaaccgctcaaaatacggctttaccgcctccactctcgtctgctggagcatgatctccgaaacccacacccggtatggagtcggttcctctcgccatggcaatacacgggcatgatttaaaaaccattgcaataatggggatacaagttgctttaagtcgtaatcttttaacatgtatgtctcaaactttctttgttatatagcagccttcatgtctgcgcttatttttttcaaaccagtaccttatttgaggtcaaactggctgacaaatactgcgatcttctctaaacatttcttaataatgtctttggaataagcataagagcagcggatgtaaccctctgcacaacttccaaatgcgtctcccggaatgactgccaccttctgttcctgcagcagacggttacaaaattccatgctggtaagtcctgtttttttgatcgacgggaatacataaaatgcaccttccggttctgtcacatccagtcccatattccggaacccgtccaccatgatctttcgtctctcatcgtattctttacgcatcacatcgatctcttcgtcacgaaccggactcgtcagtgcttcaagcgccgccacctgtgacgttgttcctgcagacatggtcgtaaactgatgaatcttattcatatgaaaaataacttccgcaggacccgctgcaatacccatacgccatccggtcattgcaaatgcttttgaaaaaccatttaataccacacaacgctcatacatatccggcagcgccgcaatagatgcatgctttttgccataggtcagctctgcataaatctcatctgtaatcacaaaaatatcatgtgcggtcacaacctcacggattgcttctaaatcctctttttccatgatcgctccggtagggttgttggggaatgagatcagcagtacttttgttttatctgtaattttttcttcaagttcttccttcgtcaggcggaatttattttctgcctttaacgggatggaaaccggaatgccgccacacaattccacacacggaatataggaaacatagcaaggttctacaactaacacctcatcccccggatccaccagtgcgcggagtgcaagatcaattccctcactcgcccccattgtgatcagaatttcattttccctgtcataatgaagtccaaacttttccagatactctgcagatgccgcacggagttcgaccgtaccgcgattatcggtatactttgtctcacctcttttgattgaagcaatcgctgcctccctgacatgttccggtgtcggaaaatccggctcgccgacaccaagtgacaatgctccctccatcgtatttgcaatatcaaaaaagtccttgatccctgaatccggcatctcctttactaccttagataagtatgatttgcttgtgtccatggtttttcctcttttctgtgtctttgtcaaaatatcataccacctatcatagcactttttctaccaaatttatagtgaatttttcccataatctattgacaaattcagggaaaagctgtacgctattaataacgtatattgttaattttttatcaaactattcaggagggttccaaacgatgagcgattttaacaatttaaaactggaagttgctgaggagattgctgttcttacaatttcaagaccagcagcattaaacgcattaaacagcgagacattagacgagttaaacacagcattaactgagatcgaagcaagagacgacatcaaagtcgtaatcttaaccggcggtcctgacaagaaaggcaacgaattcaaatctttcgtagcaggcgctgatatttctgagatggtaaactttaccgcagcagaagcaagagctttcggtatgagagcttccgtaccattcttcaaattaatgaacatgcgtcaggtaacgatcgcagctgttaatggttttgcacttggcggtggatgtgaaatttccatggcatgtgatatccgtatcgcatctgacaacgctactttcgcacagccagagacaggtcttggaatcattcctggattcggcggtacacaaagacttgcccgtttagtaggcatgggacgcgcaaaagagatgatctttacctgcgattccgttgatgcagcagaagcttaccgcatcggtcttgtaaataaagtagttgctccggaagagttaatgaacacagcaaaagctatggctaagaaaatcatctccaaaggaagctacgctgtttccgttgcaaaagcagcaatcaacaacggttatgatatggacatcaagaacgctgttgagatggaagcaaacttattcggcgtaacctgctctactcatgacaaaacagaaggtatgactgctttcttagagagaagagctgctgatttaacagatttctaaaaaaacatatcaaaaaaacgggctgataattcagtccgttttttttgatatactcatattccaaatttaatgtgcaggtaatctctgattacctctacgcatttttcacgcccccatcaaaaccgacaccaccggcatcgtcaccgcagcaagaattgccgtaagcgcaactcctcttgccgccagatcataatttccatcatattgctgtcatactgccgacaggcgttgcgagcatgaccatacacacgcctaaaatcatcggatcatcaacaaactgctttatgatccatgtgcctgcaatcaaaaaaaacgtcagaaccctcttagttccaacgcctttgtcaataatttttatcatttgtatgtaatatagtcgatagctatatttttgtcaatatcccgctgtttctatatttcagtggagaaatgccatatgtttttttgaaacttctgataaaatagcttacattctggtatccgctctgcatagctgtctccgtcactgaaagatcggtgtcctgtaacaactgttttgcattctccaaacgtaaatatgttatatattgcgacaatgtaatatggaaatgttccttaaaataccgcgatatatatttttccgaaagatgaaactgttccccaaattcctttagcgatatctttcctgtaaaattctgctgtatatatgaaaccatctctttttctacaatatttctgccgcttgtatcattttctattacaaatcctttcttccacatttcaagaataaattgtaaaagaattatttttgtctttatctgcgcagttatttttgactcagtttcatcattttctgccatatatatatcaatcagctgctcacacagttcttttgccgagtcttttactcttgggtttatcatcaaatgaccgctatttaatggttcaagcaatttatcatctaacatgtcatcggtccgaaaagatatatattttaacggaaacaaaaatgtaaaataatccacagtgccggtctgtgagcccataagatgcagattgcccggcgatacaacgaacgcatcccctgcttttccaatataactctctcctgatatacttaccgtcagcaaaccactttttacatatataatctcaaattcatcatgccaatgtaccggtatctgaaatgaccgccccgcattctctatgtgatatatactaaatggattgtcctttgtaccatgtggtttattttcctttaattcaaagtacatactctctcctacaattctacaaggctcttgcttttccattttccgctcttccatctaagcaccattccaacagctctcgcgcactcatcacctgccatggcaatatatgctcctactgcctgaagtcccatatgtattccaagaaaatatgttccaccaactgcaaacagatacataaatatcgcacccattataaccggaaaaaccgcatctccactggtttttaatgcctgaccatatacaagatttgtcacccttccaaattcaaggaatatatctactattaacagccttaccacaagatttatcatttgcgcatcatccgtaaatatatgaactataaaatgtccggacatcgcaaatgtcacagagaagcacgtcgctgttataagaccatataccacagctttccgcgtacccctgtcacattcttcaaactcctttgatccaattctccagccagtcataatagcattagcctgtgcaagtgcagctcctatacaatacgaaaaatttgctatctgcatagcatatgaacgggctgtaacattcattccgactgcatccatctgattcatgaatcttactataagtgtcattgcaacattataaagtgctgtttcaaatgcagaaggaaaacctatcttaacaatctgcgcaagtatcttccgtggcggaatgcgctccggactctgctttgcctttatcagtacagcacccatgcctgctacaatgataaggttcacaacttttgaaataactgtggcaatagcaacgcccattactccccaatgaaatacaaacaggaacactgaattaaatattatattaatggcatttcctgcaatcgttcctatcaaggaatgctttgtatatccaaacactctgagatagctggaaaaaatgggaataagcgcatttaaaacacatgcacctccaacaattttaaggtatgtttctgccggctcaagcaaagccggagaaatacttacgattctaagtatttctccagaaaaaaaggcaataataaccgacataaggatacctgtcagtgcgttaaacataagtccaagctgtctggcctgatatgcaattccaggtctccccgctccgatattttgtgacataactgctaccataccggatgatattaccccgaacatgatgataaaaacacttatatacgtatttgctgttccgacagctcccacagcctggtcgcttacagacgataacataagtgtatcgaccatgcctgaaagcatataaaataaagtctctaagcatattggcacagccagctgtgtcaatgtttttctttcagttgccatgtttttctcctatgaaaactaatataacatacattatcaataatatggtatttttctgcatatttcttgtataatattatgcaaaaattgcattatttctacttatttacgaaatgaatcagcaagtctgttaattttgccctgatctgcattatcataggaaaatattttatgattccacattctcatctctgcataaaatgttgacgtttccccccaaatagactaggatagaatttgaatgataaatacgcaaaacaaggaggaaaatcctgcccaatgtgttgggcattgctcctgcaatggcagtcgcattttgctccgcaaaacaaggaggaaaatcctctgctcctgcaatggcagtcgcattttgctccgcaaaacaaggaggattttatgttagataaaatgattggttttatcggtgccggcaatatgggaagcgccatgatcggcggtattctggatgcatctttagtgacgaccagccagatcatcgcaagtgcacactctcctgagacacttgataagatccggacaaaattttccatagagacaacccagtcaaacgaggtcgttgcagaacgaagcgatattttgtttctcgctgtaaaaccaaataaattttccgaagtacttccgcagatcaaaggtcatttaaaaccggactgtatcgtagtttcgattgcagccggacagccgatcgcaaatatcgaggcgctgctcggtgaggtcagactgatccgcgccatgccaaacaccccggcgcttgtaggcgctgcgatgagtgcactctgtccgaatgacaaggtaacaccagaggaagtaaagctcgttgagtccttattcaacagcttcggccgtgcagaagttgtaccggaaagcatgatggatgccgttgtcggcgtttccggttcttcccctgcctatgtctatatgtttattgaggcaatggcagacgccgccgttgcagacggcatgccgcgcgcacaggcttataaatttgctgcccagtctgttttgggcgccgcaaaaatggtattagagaccggaaagcatccgggcgaattaaaagatgctgtctgctctccgggcggtacgaccattgaggcagttgcagctttagaacatggcggtttccgtgatactgtgatcagtgcacagcgcgcatgttctaaaaaatcatatgatatgagtcaaaaataa

SEQ ID NO: 573 - DNA, 13645 bp, unidentified
  source 1..13645: mol_type = unassigned DNA
atgttcaacaaacaccctaaaggtctgattgccgcatcctttgctaatttgggcgagcgtttcggcttttataccatgatggccattcttgtactttttctgcaagccaagttcggactggatggaaaagaggcaggtttgatctactcaacattttatttttctatttacattcttgcattgataggtggtattattgccgacagaacccgtaattacaaaggtaccatctttactggcattgtcttgatggcggtaggctacttgatgcttgccatcccgtctcctacaccggttgccaataaaaccttgtttttggtgattacttgtgcggccttgtttgtcattgctttcggaaatggtcttttcaagggaaatcttcaagcgctggtagggcagatgtacgacaatccccaatattccagcatgcgtgattctggtttctccttattctatatgttcatcaatgtaggtgccatctttgctccgtttgccgcagtaggcgtacgtaactggtggctgtccacattcggctacaattatgatgccgacctgcctgccctttgccacggacatctggcaggaacgctgactcccgaagctgtggacacttatagtgcactggcaacgaaagccactatttccggaacacccgtaacggatatgacggtatttgccaatgaatatctgaacgtgtttaccaccggtttccattatgcattcggtgtagctatcttggctatggttctttctttggtaattttcgtcattaacagaaagaaattccccgatcccagcaagaaggttgctgcaaaagcgggcgatgccactgcagtggagatgaatgcacaagaggtaagacagcgcatgtatgcattgtttgccgtattcggtgtggtaattttcttctggttctcgttccatcagaatggattgacactgacttattttgccaaggaatatacagatttgaatttgttcggcatggctatttcagctgagctgttccagtctttgaacccgattttcgttgtgtctctcactccggtcatcatggctgtctttgcagcacagcgtgccaagggtaaagagccttccactccgcggaagattgccatcggtatgggtattgctgccaccggcttccttataatggctatcggttcttatgtaagcaacttgccgatgcacaaggatattatcgctttgggtacctctccggtgaaggtgactccgctgttgctgatggttacctatctgatattgactgttgccgaattgtacatttctccgttgggcatttcattcgtatccaaggtggctcctcccaaatatcagggtatcatgcagggcggttggctcggtgctactgccattggtaatcagttgctcgttatcggtgctatcctctacgaaagtattcctatctggatgacgtggacggtatttgtagtagcgtgctgcatttccatgttcaccatgctgttcatgctgaaatggcttgaaaaggtggcgaagtaatcggaaacgaaagataaaactaaaggctgcgcaatgttcgtaatgaactgcgcagcctttagtttttggagggcttttaatgccgggactcagatttccagtcccatgatgtagtcattcatgtaatatccgtttcctatcgggaaatccccttcacggagttttcgcattcccatatgttcgtaaaactgcagtgccttgttgttgcggtttacattcaattccatcagacaaaggccgggatgtacttccttgatgtacttgatggcttctcgaaagaggaaactgccgcaatgtgcaccctggtaataggggagcacataaatcttttgcaggtggaataaatcttctccttgctgctgtacggacacatagcccgccgcttcacattcttcgtaggccaggaagtagacgtggccttcctcttccatttgcttgcggatattgtccaatgaatacatccattccatcatgtagtcggtctgttcgggagtaaggatatccttatacgtgacggggaatatttgctgcgcaagtttctgaatcagtgcgcagtctgctgtcgttgcttttcttatggtaaacatatcggttgtatttatactgtttggggtgtaaagttaagccttttttgtgaaacaatcgttatctttgcagaccgttaccgaactaactaattttgattttaaaaattatggcatttacgagcaacattatgattgtccgccacagattactgaaggaactggtaaagctgtggaataacaacgaacttgtggataaaatagaccggctgcccatcgagctgagtccgaagaggtccaagcacgcgggacgctgctgtgtgcacaaagagcgcgcggtgtggaagtacaagtcattgccgcttctgggactcgatatggaggacgagacggatgagctgacccccttgtcggagtacgctgcccgtgcactggacagagcggaaaatggcaggccgaaagacaacatcatgtgtgtgattgacgaagcttgttcggcatgtgtgcagattaactacgagattacgaacctctgccgcggatgtacggcacgcagttgccaggtgaattgtcccaagaaggcagtgcacgtcaaggagagcggtcaggcatggattgaccatgatgcatgtatcagttgcggcatctgccataagagttgtccctaccatgccattgtttatattcccgtaccttgtgaggaagcttgtcccgtgaaagccatcagtaaggatgagaaggggatagagcatattgacgaaagcaaatgtatctattgcggaaagtgtctcaatgcatgtccattcggagcaattttcgaaatatcgcaggtgttcgacgtgttgcacagaatccgcaagggtgagcaggtggtggctatcgtggctccgtccatcctggggcagttcaagacgactattgaacaagtatatggcgcattgaaacaagtcggttttacggatgtcattgaggtggctcagggtgcgatggataccgtcagcaacgaggcgcacgagctgattgagaagctggaggagggtcagaagtttatgacgacttcctgttgtccgtcttatatagagttggtgaacaagcatattcctgccatgaagccttacgtgtcgggcaccggttcgccaatgtattatgctgcccgcattgctaaagagaagtatccggatgcgaaggtggtcttcataggtccttgcgttgccaagcgcaaagaggcgcagcgcgacgaggcggtggactttatcatgactttcgaggaggtggcttccgtgcttgccgggctggatattcagatggagcaggcaaagccctattccatgagtttcacttctgtgcgcgaggcgcatggttttgcgcaggcaggaggcgtgatgggtgccgtgaaagcctatctgaaggaagaggcagataaaatcaatgccgtacaagtggctaatctggataagaaggctatcggtgcgttgcgtgcttatgccaagtcgggcaaggctccggggcaatttattgaagtgatggcttgcgagggcggttgtattaccgggccatgttcgcataatgaaataactgccggaaagcgccagctgacgcaggagttggcaaagagaaaagagacatattagccctttgtccgtttatatgaagcatttgattgacaaactgcggagcaatcgcaggctggatgccgaagagtataaagccttgcttctttgtcgggacacagcccttgcagcctacctgcaagggcttgcccgggaagaagcgcttgctcgctttggcaataaaatcttcattcgcggactgattgagataaccaaccgttgccgcaataactgctactattgcggcatacggaaggagaaccggaacatagtccgttatgagctggcgcaggaggagattctttcgtgttgccatgaaggctatcggttgggcttccgtacctttgtgctgcaagggggcgaagcgccggcggtgaaggatgaggggatggtggagacagttgccgccatccggcaatccttcccggattgtgccattaccttatctttgggcgaaaaatcgcgggaagcctacgaacgtttcttcctggcaggtgccaaccgctatctgttgcggcacgaaacctgcaacgaagggcattatcaccggcttcatcctgctgagatgtccctttcccatcggttgcaatgcttggactggctgaaagagataggctatcaagtgggaaccggaatcatggtaggcagtccttaccagacggtggaccatctggtagaagatattctcttcatcgaacggtttcagccggagatgataggcatgggaccttttcttccgcatcacgatactccgtttgcctcttttccgccgggagatatggagttgacgctgaagttgctttctatcttccggctgatgcatcccgtggcactgatacctgctaccactgccctggccacacttgctccggacggacgggaacggggaatattggctggcgccaatgtcgtgatgcctaatctttcgccttctcatcagcggacgaagtactccctttatgataacaaagcttctgcgggtgccgaagcggcagaaggtttgcaaaaattggaggaacaactaaaagggataggctacgaggtatcaaaagagagaggagattatgagaatggagaattgaccgttgataattgataattttcaaatcttcattctttattttaattaccaattgtcaatttacgaagtgtataacataaagtcaagacaagcagaagaattcatcaatcaccaggagatattggatacattggagtatgcgcaggtaaaccgcaacaaccgtccgctcatcgaaagtttgattgacaaggctgctttgtgccagggactttcccatcgggaggcggccctgctgctggaatgtgacgagccggaactggtgcagcgcatctatcatctggcacgtgaaatcaaacggaaattctatggcaaccgcattgtgatgtttgccccgctttacctttccaactattgcgtgaacggttgcgtctattgcccgtatcatgccaagaaccgtaccatcccccgcaagaaactctcgcaagaggagatacgccgcgaggttatcgccttgcaggacatgggacataaacgcctggcgctggaagccggagaagaccctcgaaacaatcctatcgactatatcttagagtccatccgcaccatctacagcatccaccacaagaacggggccatccgccgggtgaatgtcaacatagccgccactacagtggaaaactatcggttgctgaaagaggcaggtatcggcacttatatcctttttcaggagacttacagcaaagagcattacgaagccttgcatcccacgggaccgaaaagtaattatgcctaccacaccgaagcgatggaccgcgctatggagggtggcatcgacgatgtaggtatcggtgtattgtttggtctgaatacctatcgctacgacttcgtaggattgctgatgcatgccgaacatctggaagctacctttggcgtgggtccgcataccatcagcgtaccgcgcatttgtccggcagatgatatttcgaccgaggattttcccgatgccatctcggatgagatgttctgccgtattgtggcggttacccgcattgcggtgccttatacgggaatgattatttccacccgtgagtcggaagccgtacgccgtcgggtgctcgaactgggcgtttcgcagataagcggcggttcgcgcaccagcgtgggaggctatgccgtgccggaagccaaagaggaagattcctcccaattcgatgtgagcgaccggcgcacgctggatgaagtggtgagttggctgctcgacctggggcatatccccagcttctgcaccgcctgctatcgcgagggacgtaccggagaccgcttcatgtcgctcgtcaagcgcggacagatagcaaactgctgccagcccaatgcactgatgacattaaaagaatatctggaggactatgcctcctccgaaactaaggagaagggcatacagctgattcgtgaggagatggagcatatcccgaaccccaagatacgggcgatagccgaacgtaatcttcaggagataggggaggggaaaagagactttagattttagatttcggatttatgaataatacacctcgttccaaccgcctgcacattgccgtctttggacgacggaacagcggaaagtccagccttgtcaatgccttgaccgggcaagacacggcattggtatccgcaacgcccggcactactaccgatcccgtaaccaaagccatggaagtatatcctttgggcccgtgcctctttatcgatacccccggttttgatgacgacgaaggcgaactgggcggtatgcgcgtggagcgtaccttaaagacggtggagaaagcagacatcgccctcttgctttatgaagctgacggaacgctggaacagcaatggctaaagctgctggcagcgcgcgaaatccccgtgatactgatactgaataaagccgattcccgtcaagacaccgcttccgtggttcttcggattgaaaaggagtgcgggcaggctcccgttgtggtcagtgccaaagagggtaccggcattcaaggcattttcgatgctatcctcgaaaagcttcccgagaattttggtgagcagactatcacgggcaatttggtaagtgaaggagatgtcgtcctgctggtgatgccccaggatatacaagcccccaaaggtcgtctcattcttccgcaagtgcagaccatccgcgaactgttggataaaaagtgcttagtgatgagctgcaccaccgacaagctgcaagcctccctgcaagcccttgtccgtccgcctaagctgataatcacagactctcaggtgttccccatcgtctatcaacaaaagcctgccgagagtagtcttacttccttctcggttctttttgccggttacaaaggagacatcaatgcctttgtagagggagctgccgctattcatagcctgacaccccaatcgcgtgtactgatagccgaagcctgcacccacgccccgctgaccgaggacatcggcaccgtcaaaattccccgcctgttacgaaagcgcatcggcgaggaattgcagatagactttgtatctggaaatgactttcccaaagacttgttccgatatgatttaattatccattgcggcgcttgcatgttcaaccggaagtacgttctcaatcgtatagcccatgcccacgcacagcacatccccataaccaactacggagtagcaattgcgagtctgaccggtatattggataaaattgttatccatcggtaaatatccctcttcctctctgttcacgttactgatgttatagagtagcgtgaactacttttcttgttaataatgtttaatataaagtactttgtaatgcaaggtactggtataatacatatatttgtgccatacaaggaacaacaatagaatgaataaggacactcattactctattgcgcagccaaatagtaaatcgtaaattgtcaaatagtaaatactattatggatgtaaacaatgtaaagtcgcaaatgcgcaagggcatgcttgaatattgcatcatgctgctgcttcacaaagagccggcttatgcttcggatatcattcagaagttgaaagaagccagactgattgtggtggaaggtacactttatccgttgctcactcgtttgaagaacgacgaccttttggggtatgaatggattgagtctacacaaggtcctccccgtaaatattaccggttgacggaaaaaggagaagtctttctcggtgaactggaaacatcctggaaagagttgaacgagacggtgaatcacattagcaattcttgaaatgaccacagagaatatgctgcattcgccgaatggtaaatagtaaatcgtaaatagtcaaattgtaaataaatagtgtgttatgaaaaagacattaactgtaaatttaggtggaaccgtttttaatattgatgatgacgcataccgccttttggataattatctgagtaatctcaagatacacttccgtaaggaagccggtgccgacgagattgtagatgatatagaacgccgcatttccgaactctttgccgagaaattgtcggccggttcgcaagtaatcacgatagccgatgtggaagaggtgattgcccgcatgggaaagccggaagatatggaggcggaaggagagagtgctagtgccgattccggcagcacgagtgccgggggcggctatggtgccggtgcttggaacagcaataccgcttatggcactacacgccgtcgtctataccgcaatccggatgacaaaatgctgggtggtgtcatcagtggaatggctgcctacctgggatgggatgtaactttacttcgactgttactgcttgtcatcttgatttgtggggtagggacattgataccggtctatatcgtgtgttggctggttataccggaagcccgcacagcagccgagaagttgagtatgcgtggcgaggccgttacggtagagaatatcggaaagacggtgacggacggttttgagaaggttgccaatggggtgaatgattatatgaggtcggacaaaccccgtactttcttgcagaagttgggagatgcattggtgatgattgtcggctggttcttgaaaatctgtctggtgatatttgccattatctgcagtccggtactgtttgtatttggagtggtatttgtggcgttgttgtttgctgcgatagcggtggctgttggtggtggtgcagctctcatttcccttttcccgatggctgatgtggtactgcctacttctccgctgtctgccattgtgatgtacattgcaggtatcttgttggtaggaattcctttggtcagccttgtgtgggccatctttagccagatattcaagtggcagccgatgaactccggtttgaagtggacgctggttatcctttggattgtaagtgcggcttgcttcggaatctgttttgcagtgcaaggggctactttcccggaattgggtatatttaacttctgagaatagtaatttcttttttaattgatatcgtgtttgtggaaatctgatttctataaacacgatattttttatttggttgtaattggttgttatacagtgaaatattgcgtttggaaaaggcgttttttaaacgttcgtttaatgaacgcaaagataacgtgtatttttgaatctcgcaaaatgtttaataaaaatattctataaatttctttttagtgagtataatactttgtcagtaagcctgttgcattgtatttctctaacttcttccttttactaatttttaagtaatcttccctctttaattttcttaaatattgacgttcaaaaaacgaacgtctattgaacgctttttgcttgcaatagattcgtttacagcattttacctgttaggtaatgaatgactgcaaaaaatctgttgacaagaagggcataaagcttgtcgtattctacataaagtgtccgcaagtgattgaattccaagtgtatgcaaggaatttaaagccccaggagaacacccttgtctgaacaaaagcataaaaatgggaatagagaaagaggtcgaaatctggtatgctatgcgtgccacctaccgcagagaaccggatgccatgcatctgctcaagaaagaaaatttgggctgtttcattcctatgcaatacaagatatgtataaaaaaagggaaaaaagtccgtgctctggttccggtcgttcataatctgctttttgtccatgcccgtccttccgatgtgcagcgcgtaaaatctcaagtcacttatctgcaatatattaccgatacccgcagtgggcagaagattattgtccccgacagtcagatgcagcgtttcattgccgtatccggcacttacgatgaccatcttctttattttcaaccggatgaattgaacttgtccaaaggtaccaaagtccggattaccggcggtgaatttgaggggcaagagggtatatttctgaaggtgaaaggcgcacgtgaccgtcgcgtggttatcgaaatacaaggtgtcatagctgttgccatggccactatccatcccgatcttatagaagtaatcggctgaactttaatttttaattcttaattctataattgcttatgtctctttccgaagaagcaatcactcttcagcgtgctgcgcacgaactgatgtatttgggtatggacggtagtcccgtctatagcgatgacttgtcacggcggaacggtgaggtctaccgtcttaccatggctttgtaccggtcgggtgtaaaaggcactaccatcgacgagcaggcaaatgtctgtcttgcccttcttatgggttacagcgcctcttttgtcgaccatggcgaaaagcagcggcatgtccagaaagtgctggactgttgttgggatgtgctcgatgcccttcccgcttccttactgaagctccgtctgcttaccgcctgctacggtgaagtgttcgacgagtctttggccgacgagggccgttccatcatcgcctcctgggattccttatcacttactcccgaacagcaggaagcggttgatgagtttcagaatgtgacagacaatccctatccgtgggaatatatcgatgaataaaacttttcattataatgcttaacaataaatccgtattgattaccggaggaacgggttccttcggaaagaagtttgtggaaaccatcctccgtgattatccgcaagtaaagaaaatcattatttactcccgcgatgagctgaagcaatttgagctgaaacagaaatatcccggtcataagtatccgcaactgcgtttctttatcggtgatgtccgtgacctcgaacgtctgacgcgggcttgcgaaggagtggacgtgattatccatgcagccgccatcaagcaggtggataccgctgaatacaatcccgaagagtgcatcaaaaccaatgtacacggtgcgcagaatgtgataaaggctgctcttgccaccggtgtacagcatgtggtggccctttctaccgacaaggcttgtgcccccatcaatctttatggcgccaccaagctcacttccgacaagctgtttactgccgccaacaatatcagcggttccaagaacatcaggttctccgtagtccgttatggcaatgtgatgggttcccgcggttccgtaatccctttctttatcaacaagcgtgacaacggggcgaaggaacttcccataaccgatttgcgcatgacccgtttcaacatttcactggaagccggtgtcgctttggtcatgtatgccatcggacatcacctgggtggtgaaatctttattcctaagattccttcctatcatatccaggacgtggctaccgccattgcacccaatctgccgcaggtggaagtgggcatccgtccgggagagaagctgcacgaggagatgattactgtaaccgatgctcttgatacaatcgatttgggcagatattatgtcattcttccttccgtatctttcaagcacagtcgcgaagagttcatcagacatcacaatgcagtacccgttcccgacggtttccactacagcagtgacaacaatacggagtgggagacagtagagactatgcgcgagaatataaagaaatacgttgaccctaatttcgaggtgaaatgataagcaagcctattccatacggtcgtcagcatatcacagatgaggatatccgggcagtcatcgataccctgaaaagcgattacctgacacaaggtcccaaaatcagggaatttgaaacgaaatttgccgaatatgtaggtgcacaatatgccgtagcggtgaacaatgccacttcggggcttcatcttgcagctaccgcactgaatgtaaagccgggcgacaaggtgattgtcactcccatgacctttgctgccagtgccaactgcatccgctattgtggcggcgaggtggtattctgtgatattgacaaggatacttacctcatggatatccgtaaactcgaagccatgcttaaggctgctccccgcggtacttacaaaggtattgttccggttgattttgcaggctatcctttggatctggaagagttcagaaagcttgccgacgagtacggcttgtggattatagaggatgcctgccatgctcccggcggctatttcatggacagtaaaggcaagaaacaacattgtggtaacggttgttttgccgactgtgccgtattctctttccatcccgtgaaacatatcgctacgggtgagggaggcatggtgaccaccaacagcaaggagctctatgacaagctttgtctttaccgtacgcatggcattacgaaagaccctgccttattgcacgagcatcatggtggctggtattacgagatgcaggagttagggtataattaccgtctgactgattttcaggctgccttgggtatttctcagctggagcgtgcgaaagcaggtcttgaacgtcgtcatgaaatcgtaagacgctataatgaagcgttttccggaatagatggtatcaagactccgttcaatactgccgatgtctatcatgcttatcacctttatatcattcaagtagctgaccgcttgggtctttataattatctgcacgagaacaatgtctatgcgcaggttcattatgctccgcttcatctgatgccttactatcagcagtggggcaataggaaaggcgatttacctatagtagaagagtattacgaacattgtctgagtcttccgatgtatcccacgctgacggacgaggaacaggagtatgtgattgaaaaggttatagaatttgtagcgaaatgaaaaatatagcaatcattcctgcacgtggcggcagtaaacgtattccgcgtaagaatatcaagccctttatgggtaaacctattattgcatattccatagaggcagctttacaaagcggtctttttgatgaggtgatggtttctaccgatgatgaagagattgctgagatagcttgtaaatatggtgctcaagttccttttatgcggagtgccgagatgtcaaatgactatgccggtactgatgatgtaattcttgaagtactgaggaagtataaagagcaaggcaggaagtttgaaacggtttgttgcatttattcaacggctcctttcgtcactcccgaaagactccgggaagcatacggaaaaatgaattcggagatagattccgtcttcacttgtgtggcttattcctatcccatacagcgcagccttcacatcgtggatggaaaaattagtatggtttatcccgaatacaaaaatacacgttcccaagatttagaaccgatttatcacgatgccggtcagttctatttctctcgcactgctccctttgtggagagccggactttttggggtgagaatacagccgggttggtactttccgaacttgaagtgcaggaccttgatacactgactgactgggcattggcagagatgaagtatgagttgcttcataaataa

SEQ ID NO: 574 - DNA, 9164 bp, unidentified
  source 1..9164: mol_type = unassigned DNA
tcatttttcatcaacaacctggaagatgtagaatttcagataatagctctcctgcgcctcccacagtattgggtggtcaggtgactgtgtcctgaactcgacctgacggagtcttttatgtacagctttagcggcttccttaatagtcttggtaagaagctcctgtgtcatgaagtgtgagcatgaacagcttgcaagatagccgccgtctttgacaagcttaagtcccttcatattgatttccctgtagcccttgattgcgttctttgtagcttccctcgatttggtaaatgccggcgggtcaagtattacaacgtcatatttctcacctgcttcgttaagctttggcagctcatccaatacatttgcacatttaaaatgtactgtattctcaagtccgttaagcttggcattggctctcgcctgttcaacagcatattctgatatatcaagtccagtaacttccttagcacctgcaattcctgcatttaatgcaaatgtacccatatgggtaaaacagtctaatacccgcttgtccttgcacagcttctgcattgcaagtctgttgtacttctgatcaagaaagaacccggttttctgtccattcacaacatctatcatgtagtggacaccattctcaactatctcaacattagtgtcaaattcatcaccaataaagcccttaactctctccatcccttcaagagtacggactttggcatcgcttctttcatatactccacggatatcaatgcctttttcatgaaggatttccttcactttttcgacaataagtgacttaaatctgtcaatacctaaagcaagcgattccacaacaagcacatctgagtacttatctataacaagccccggcagaaaatctgcctccccgaatataagacggcaggcagaggtatctactgtgtcaaatctgtattcaaccgcagcccttactctctcctcaataaatgcctcatcaacaacatcagtgtgtcttgcaagcattcttactgtaatcttggattttctgttaataaatccgattcccatgaaataatcatcaaaatcaagcacctcaacaagatgtccgtcaattattccgtcagacatccattcaatttcattatcatatatccaggcaccgcctgcctttaatgttcttccttcaccttttcttaatcgtatctttccgcatacgctgaataaatcttccattctgttccttcctgccagatttttctgacatttatcataattattcataatatattaattcgttgacggattaccaagaaaataaaacatacatactcctgcaaccgtaataagaagcgacacgagcttaatccatgaaaatgtagtcttctcacttccaaacagcccgaaaagtcccagcagatacgaaacaattatctgcgcaactacaatcgtaacctccgctttagcaattccaagaccacttatactttttataactgtaaatgttataaatgcacctatcacacctccaagaagtgtaatcttgttatcaaccttaaacaacttcatgatatcaggtcttccgtcaattacccacataatcgcacaagtcgccagtgctgtcaactgcacaaacattgccgtaacccacacactgcttgcttttgtaacatttgtattaaatgcgccctgtaaactcataagtgtgcctgatattattgcaatcaaaaatcctgccattaactaacctccccattaatctgcatagaataattattagttaataacaggatatttattcataatattatttagtactctgcgtactgttttcattattatttttagttgttttttctattgttgttgcaaatgtactgtaagctgtatcaacatttccaccatcatatacctgatgaagcataatctcatatctcatgtatacttctccaacaccgatatatttggcttttacaacagagtcagaataaatctggtgtaacttctggtagctttctgctctcttaacctttaaatccgcccttgcacagcttttcttagccatgcttccaagataatctgcataatcataagaaattgctcttgcaacagccttggatgcatctacattcttagtgtacggattaactactgccatcgtagtaacagacattgccttagaatcaaggtcatctcccattgaaggatactcacatattccataatctacatctgtaacattaatctctgcaagactgtctgcatctagcaccgtatagagcatatttccagtagaaaacagatccgcacattctttaagacttactgtatttctgtcaataccaaatgcatcttttaactgagcgtacttagtaagaaccttcttaatcttttcctcattaagagatacctcagccctgttctctgcattaactccgcctatattaatataggctcctgctgctgcataattaaggaacattgaatcaggatcccattcaaacaccattgaaacatcctggttctcatctgtaatctgataattatcacttatattacgaatctggtctatagtatcaactgcttctgcatatttcttattatatacaagaaatgaagtgttgaacgacaccgggtaaccatataacttaccaccatacgaacatgcagtcattgcagccttaccatacacattctcattatagacttcaggatacatatcattctcagaggtaagacctgaaagataagccttctccatctcttcagatgtcagaaaatatatatcacatgcattgttattccttaccgattcgtcatatatataattaatatatgaatccgcctcaatatatactggcttaacagtcaccagttcattagatttcttaaactgtctggcaacgagttcaagataagactcatatgcgctgtcattataccagacattaactgtaataggtccactaagattaagcttcttcgcagcctgtgtcctgtcatctttattaccacagcctgcaaagactgtcagcatggtaacaatcagcatcatactgataaatcttcttaatttcataaagtaaactcctgattctagaaggatttcttaagcttagctatgcattcatctacatctgccttagtaattacaagtggtggaacaaatcttataacattagttcctgctgagaacagaataagtccgttatcaagtgctttggcaattacgtccttaggattaactgataactcaagtccctgcataagacccattcctcgtctctcgacaacaacatctattgtctcaacaagctcatcaagcttttcttcaaagtaagcagatacttccttgacattatctaatacatgctgcttctcaaaaagttcgaacaccttggttgctgctgcacatgcaagtggattaccaccgtatgttgttccatggtctcctggaactaatgccttcgcaacttcctctgtcgctgcaaatgcacctacaggaactccacagccaagagccttggcaactgtaaggatatcaggcttaacgccatactgctggaatgcaaacatacttcctgttcttcccattccgcactgaatctcatcaagtataagaaggattcccttctcatcgcataactttcttacaccttcaataaattctttagtagcaggataaattcctccttcaccctgtactgtctcaaatattatagcacaagttttgtcattaacaagttcctttacactgtcaaggtcgttatactgtgcaaacttaattcccggtatcataggtccaaatgcttcctgataatgcttattaccagttactgcaagtgctcccatacttcttccatgaaatgaatgctgcattgcaataatctctgcatcagcctttccgttcttgacataataatatttctttgcaagcttgactgcaccttcaatagcctctgtaccactgttagtaaagaatactctgtccattcctgaagcctttgtaagtgctgttgcagcctctacagccggttcattatagaaataattagatgtgtgtataagcttatcaatctgtgcctttaatgcatcgttatattccttattgttataaccaagtgcaaatactgctatacctgctccaaaatcaagatattctttaccatctgtatcgtaaagtcttactccgtcacccttatcaagtactatctggtaacggttgtatgtatgaatcagcttctcttctgctgtttctataatctgctgtgtattcatgattactctcactttcctattcttatgagcacacattttcacatgagccaatataatattataacctcaaagcttacggttcgcaattatttatctgagtcaaagaatttttctgcatcgtctgaaagaatagctgtaccaacacccttgttagtaaatatttcaagaagaaggcagtgtggaattcttccatcaagaatatgtactcttgatacaccatgctcaatagcatctatacagttattaagcttaggaagcataccgccaccgattgttccgctctctaaaagtgttctcgcctctgaagtagaaagctcagatataagtgaatccttatcgtcaaaatccttatatacaccttcgatatctgttaagaatgcaagcttctcagcattgacagctcttgcaattgcacatgctgcgtcatctgcattaatattgtatgcatgaaaatcatcatcatatccgatagggcatattactgggaggaaatcgtccttaagcaaggattcaataagtgttgtgtcaacatctgtcacttcaccaacatatcctatatcctcacccttagaatacttcttctcaacctttaacatgccgccatccttaccactgataccgcatgccttgacaccaagctgctcaatcattgaaacaagactcttattaaccttgttaagaaccatctcggcaatctccattgttggctcgtctgtaactcttaaaccattcttgaattcaggtgtcatgcctgacttttcaacccatttgctgatttccttgccaccgccatgaacgatgattggcttaaaaccaacaagtttaagaagaactacgtcctgaataacttttctcttaagttcttcatctaccatggcacttccgccgtacttaactacaattatctttctgttaaatttctggatataaggaagtgcctcaacaagcacctgtgccttcataagttcctctgtcatatcttttgcgctcataataatctccatttcatatttattcagatatatttgctttaaaatgctgtgtcaggttagcttctgtaatcagcatttatcttgacataatcaaatgtaaggtcacagccccatgctgtagcgcttgcatcgccctgcttaacatccgcaatagcaattacaggattctgtgaaagtatttccgttgctttctcctcgctgtaatctgtagcagttccatctttaacaatctgaagctcacctgcttcactcttaaagaatatatcaactttttcagggtcaaagtcagcaccagaatatcccattgcacagagaattcttccccagttagcgtcatgtccgaatattgctgccttggtaagacttgatgtaacaattgacttagcaagtgtcttggcttctgccttagttgttgcaccctttacctgaacctcgaaaagacatgtgcagccttcgccgtcacctgcaatcatcttggaaagctctgtaaatacatagcttaagccttcatagaaagcattataatcagcaccctcttctgtaatcttcttattgccagccattccattagcaagaacaagagctgtatcattagttgatgtatctccatcaactgatatcatgttaaatgaatcatcaacaattgcacttgtcatcttctgaagaagtgccttgtcgatatcacagtctgttgttatgtagcagagcattgttgccatgttaggatgaatcattcctgcgcccttgcacataccaccgattgttaccttagtacctgcaatctctacttctacagcaacctgcttgcttcttgtatctgtagtcataattgcctctgctgcctgtgttcctgcttctaatgaatcatcaagcattggagcaagcttttcaattcctgcacatattctgtcaacaggaagctgcattccgataacacctgttgaaccgataagtactgcattctctggtacattaagaacctttgcaactgcctttgcttcttctgcacatgcattatctccttcaacacctgtacatgcgttggcaacaccgctgtttacaactacagcctgtgcaaagtcttcattatatacaatgtttctgtcccatttgacaggagctgcaaatactttgttagttgtaaatgttcctgctgtaacacatggcttctcactgtatacaagtgccatatctttctttccgttcttatatttaatctgtgcttcacatccggcagccttgaatcctttagctgctgtaacaccgcctttaattatattcataatatcctcctattgtaccatcacatatactctgtcatcgtgcatatttcgtcgtgtaaattctgaatttatgctacatttattatggaaacattggtgcaagctgtaatccctcattctctggaagtccgaagagaaggttcatattctgtactgcctgacctgctgcacccttaacaagattatctaacgcacccatcattataagtctgttagttcttggctcaatcttaaatcctatatcaacaaagttgcttccctcaacccagcgtgtttcagggcatacatctttaggaagtactcttacaaaatattccttatcatagtacttgtcatatgctgccttaacatcttcatatgtaacatctttggcaaggttggcgtatgctgttacaagaattcctctgttcattggaaccaaatgtggtgtgaagataagctttaaattatctcttccacatgcataacctaactgttcctcaatctcaggtgtatgtctgtgagttcctacgccatatgccttcatgctttcattaacttcgcagaaaaggttggcaaccttagcgccacgtcctgcacctgaagttccactcttagcatcaattataattgtatccggattgattattccttccttaaccattgggtaaagtgtaagaattgatgttgttgtataacagcccgggttagcaatgattcttgtatctttgctcaccttgtctctgttaatctcacataagccataaacagcttcatcaatatactgtggtgctttatgctcaagcttataccactgttcatatacattaacatccttaagtctgaaatcagcactcagatcaataatcttagtctttgaaagaatttcgtcattaacaagtgatgcacataagccctgtggtgttgctgtaaatataacatcaacctcgttagcaagctgctccatattgtcgtccatacattttgcatctacaagcttaaacatgtttctatatacatctgaataattctgatctatgtaacttctcgaaccgagccatacaatctctgcatccttatgtcctaataataatctgacaagctcgttacctgcgtaacctgtcgcaccgataatgcctactttaatcataactcctccttgttttgcgaagcaaaatgcatatattcaacatttatgcataaaataacgcaaaatgtaaattgataacctacattatagcaactttttttcttatgtaaaggatattttaaagaaaattcatatttatacatttttgttgtatattaatgtataatatgcataatttgttgttgcatttttaaataaagtagtttattataatctgcaggtgcatagcatatgtgttttactatgtaaacttaataatatacggaggaatatataatgaaagaaaaagttattcttgcttattctggcggacttgacacaactgccatcatcccttggttaaaggaaacatacaactatgatgttgtctgcgtatgtgcagactgtggtcaggaagaggagttggacggacttgagcagagagctctctcatgtggtgctgctaagttatatatagaagatatcactgatgagttctgcgacaactacatcgttccatgtgttcaggcacacgctgtttatgaaaataaatatttacttggtacttcaatggcaagacctcttatcgctaagagacttgttgagattgcccgtaaggaaggtgctgttgctatctgccatggtgctactggtaagggtaatgaccagatcagattcgagcttacaatcaaggctttagctccagatatcaagattatcgctccttggagagattctaactggaagcttcagtctcgtgaggatgagattgaatactgcagacagcatggtattcatcttccattcagcacagactgcagctacagccgtgaccgtaacatctggcatatcagccatgaaggtcttgagcttgaagatccagctaatgagcctaactacaagcatttattagttcttggatgcactcctgaggaagctccggatgaaccagaatatgttactatgacatttgaaaaaggtgttccaaagtcagttaatggcaaggctatgaaggtttctgatattatcagagagcttaacagacttggtgccaagcatggtatcggtatcattgatatcgttgagaaccgtgttgttggtatgaagtcccgtggtgtatatgagactcctggtggaacaattctttacgaagctcatcagcagcttgaggaattagttctcgacagagatacaacaacattcaagatggatgttggaaacaagtttgcacaggttgtttacgaaggaaagtgggagacacctcttcgtgaagcacttcaggcattcgttgagaagactcaggaatatgtaacaggtgaagttaagttcagactttacaagggtaacatcatcaaggctggaacaacatctccatattcactttacaatgagtcaattgcatcattcaagacaggtgatatgtatgatcatcatgatgctgacggattcatcaacctcttcggtctttcacttaaggtaagagctatgaagaagcttgagaatgagaagaagaacaataagtaa

SEQ ID NO: 575 - DNA, 7531 bp, unidentified
  source 1..7531: mol_type = unassigned DNA
atgaaagcgattcaatggatcatttccgctctggttgccgtggtcatcatcgccgccgccgttggcggcggggtgtactttacccggctcaaaagcatccacagcatccgcaaactgaccgattacgaaaactataacctctaccgcatggatattgactatgcgtatgatctcgaccgcctgatcgaccgcggcattaccgataaccagagcatgatcaatgccatcctggccgaagctctgccctacctgcccatccatatgaaagccccaaactttggttgcagcgcgttctgcacccagggcacggacggccacaccctgatgggccgcaactatgatttcaagaacgatacctccgccatgctggtctactgcacccccaaggacggttacgcctcggtcgcctttgccgcactggataacatcaacgccaacacgccggacgcgagcatggccaaaaagctggcaaccctcaccgcgctgttcatctgcctggacggcatgaatgaaaaaggcgtttctatcgccgttctcacgctggacagtgaccccacctaccagcagaccggcaagccgatgatcgctaccacccttgccatccgcctggtgctggaccgcgccgccaccacagccgaagctgtagagctgctgagcaaatatgatatgttcgcttccagcgggcgggattaccacttctatatcaccgatgcttccggtgatggccgcgtgctggaatacgactgcaatgaccccgcccgccccctgaccgttacccccagccgcagcgtaaccaacttctttgtcatgtacaaggataacgttctgcccaaccagcgcaacggcgtttacggccatggccgggagcgctatgatgccatcgaggaaatcctggatgccaatgcaggcagtattgaccgggaaattgcctggcaggccctgcaggcggcctctcaggcccccaacccgaaggatgtgaccagcaatacccagtggagcatcctgtacgataacaccgccctgaccgccgaagccgtcatccgccgcgactggaacaccaaaaccagctacaacctggtaagcaatgttgccgtaacggatgtaggctgatcccgccgctttttttcgccaaatccggcaaaacgcattgcacttctcaaccagcagggctataataaaaccgcgtatgagaagaattccggggtgctctactgccccgttccagatggaggaaaacagcaatgctcaaagtttggatcagcggtgccaacggccatcttggtcaggcgctatgtacacggcttgaccgcgaaaaataccagctgatcgccaccgatgtggcggaagtggatgtgactgtccccgccgaagtccgcgcctttgcggatgccaaccgcccggatgtcatcatcaactgcaccggctttaatgatgaggacggctgcgagacggaccccgaccgcgcttaccgcgtcaacgccctggccccccgcaacctggcccttgccgccgatgcgctgggggccaagatggtgcagttctccaccgatgatgtgtttgccaaggcgagccaccacccctataatgagttcgatgcccccgcccctgaaagcctgtatggtaaaagcaagcttgcgggcgaagagtttgtgcgcacgctgtgccaccgctacctgatcgtgcgcagcgcctgggtgtacggtatcgggcgggattttgtttccaccgtgctgaacgccgccgcagaccctacctgcccctggctggccgttcccacggatcgctttgcctcccctacctcggccgatgacctgaccgccgcggtggagcagttgatcgaccatgataccctgggcatttaccatatcgtgtgccagggccgctgcagccgctatgacttcgcccaagccatcctgaaagctgcccatatggaagataaactggagctgcaccccatccgcgcagcggacgctggcagcacccccagctacaccgtgctggataacctaatgctccgcctggacaacctgccccagccccgcccctggaaagaggccctgaacgagtacattaactccctgcaataagcgtaacgcccggctgcctagcagccgggcacttttttgcgtgccgcaaaagagtaagaccaaattagcaattagaaattagcaattaggaattggagccgagctttttaggctgtcggtagggaacggcgtcctcaatgtcccggacgagcctgaaaattgccaaccatatgccccgcgccgtaaaatatttgtataggacgatgtgaaaaaatgattgtttatttgctcacaaccatgctgtagggcgggatgccctcatcccgccgtggagaaacctaaataatcggccacaactgaaaaaacgcttcctttttccacgatttttcccgcacctgttgaaaacatccaacccttccggtttgccctatgcgcatcctgcacaaatgcatccaatcaaatctatttaatctgcgcaaggcggagaatctgtaatttccctattacacaaaatttcaaaacgtgctatgatagccacaataaatggtagtcgcagcacggaaagacagcgagacgaaagtttcgctgtctttctttttttgtctgcggtcttgatttcagaaaggagcactttcctatgcccaaaacactgccgcaaagaatcgtatttaccatcgtcatggccaccatcatggtgtatggcatgatcgtttataacgttgccttgaacactggcggcgttaccaacgctacctttggcgtggctctgcacgaaatgcccattatggtgcccgtggcctttgtgctggaattctttgtggtcgaaaagctggccaccgccctggcgttcacctttatgcgccccacggaccgcccgcagttcattacctatgccatctccctgatgatcgtctgcatcatgtgcccagttatgagccttgtggctaccctgctgttcaaggagcccagctttggcacatgggtgcatacctggggctgcaactttcctatggcgctctgctggcagatgttctactgcggcccgctcagccggtttatcttccgcgctattttccgcaaacagctgcaagcggaaaaccaggaacagcactaaagcaaatccagcacgctgcccgcacaaacaggcagcgtgccttttttatcgtgttgcatcccctccaaaactttttgaacaaattccctgcttttgcttgacaacccccgccggagtatgatactatatctttgctgattagataacactaactggcgcgaagccagctgattgacctccgttccggctgcatcatatccccacaaatctccttactgcctccgtttcatttgcggcagtgcccaccgggcacgcaagcatgccgcgcaaaaatgccattatcgcctgcaagggcataccgaatcaaagcaaggccggcacccatggaatgagccacatgggtgccggttttgtttgtatgggtctgttcccccggccccgcgcaggaaaaataatacaataagacccccgcctgcaaaagagagaaaaaaggcgggggtcctattgatgtaagggggggcaaagcagcaacccatgtaaggaagggctgttccctacatgctgtgagggtcactgcctgcgagattagcacaaactaaccatgagcaaacaataccacaccgccaggattttgtcaagccccggagcaaatcaaaataaaaaagtttcaaaatattcaaaaagttagattaaataaacgctttctcggcaaaaataagaatactctgccgcagccgccaaacacaaaaagtaccttgcattttgtaacaacctgtgatagaatgacggtgttgaaggttagttaatgctaatcattggagcagtgctcactgctgattaaatagtttcccaaagaaaggatcgatcgataatggcatacctggaaattgaaaaagttgtaggccgcgaaattctggactcccgcggaaaccccaccgttgaagctgaggtctggctggctgacggcaccgttggccgcggcatggcaccttccggcgcatctacgggcgaatttgaagccctggagctgcgcgatggcgacaaagcccgttacagcggcaaaggtgtgcagaaggctgtggagaacatcaacaccaccatcaatgatgttctgaccggcatgaatgcttccgatatttacgctgtcgatgctgccatgatcaaggcagacggcaccaaggataaatccaacctgggtgcaaacgccatcctggctgtttctatcgcttctgcccgcgcagcagccctttctctggatattcctctctaccgcttcctgggcggtatttccggcaaccgtctgccggttcccatgatgaacatcctgaacggcggtgcccacgcaaccaacaccgtcgatacccaggagttcatgatcatgcctgtcggcgcaccttccttcaaggaagccctgcgctggtgcgctgaggtgttccatgccctggcagctctgctcaagagtcgcggcctggccacctctgtgggcgatgagggcggctttgcccccaacctgtccagcgatgaagagaccatcgagaccattctggaagccatccgcaatgcaggctatgagccgggcaaagacttcatgctggctatggacgctgcttccagcgaatggaagggcaccaagaagggcgaatatatcctgcccaaagccggcacccattacaccagcagtgaactgatcgcccactggaagagcctggttgaaaagtatcccatcatctccattgaggatgccctggatgaggaggactgggaaggctggcaggagctgacccgcgagctgggcggcaaggtccagctggttggtgatgacctgtttgttaccaacaccgagcgcctgtccaagggcattcagctgggctgcggcaacgcaatcctgatcaagctgaaccagatcggctccgtttccgaaaccctggaagccatcaagatggcccacaaggctggttacaccgccatttcttctcaccgctccggcgaaaccgaggataccaccattgccgacctggccgttgccctgaacacctgccagatcaagactggtgcgcccagccgtaccgagcgtgtggccaagtacaaccagctgctccgcattgaggaagagctgggcgattctgccgtttaccccggtatggctgctttcaacgtgaagcgctaaagaaatttatcctcccatagcttgttaaacagcagcagctcccgcagcatatccgaacaggatgtgccgcaggggctgctgctgtttgtgcagacatttgcaaaaaaacttgcaaaatctgccttatttgcatggaaaaacaaatagaactgcacttttttgcaatttttgttgacagcgcaaataatatatgatacacttttttcgattttgaaagacgaatcgtgtttgcaagagtttttcaaagcaatttacctacggaccgcccaacaggggcgggccgaaatactgacatttgaaatgccgcagcggcgagcgaaaagtgtaagctgctaagagaaaagcgcagcgtcatacggattgtatgaccgagcattttttcaacacagattgcactttgcagccgctgatgtggcgtttcaggcgaagccggaaatgttagtgttccgacccatggccatacggacagccgggtccactgccgatcggcaactttagttgccttattgattgagttaaaagctcaaattttataagttggttcctttacaaccatgaaattgcgcagtcagctgcgcagacttgtgaaacggtcaataaagagtagtaaaagtaagattgctatatagactctgacacgctaagtctttttgaatcatgccgcattcgctctcccggtaaacacgccggggggatttggcctgtggcaaaattaaaaaagctggtttcaaacgcaagtctgcacacccgtgtaaggcttgcgttttttgttttgccaaacggcacttcccaaaggaaccgcgaacggaggtaaacatgaacggtgagaaaaaacgcgcccggttggaccagcgccgcgcccccatccacgaagcgctggaaaatttccgccagatgcgcgtggttccctttgatgtgcccggtcataagcggggacgcggcaacccggaactgaccgcctttttgggccagcagtgcgttggggtggatgtgaacagcatgaagccgctggataatctctgccatccggtatccgtcatccgcgaagcggaggaactggccgccgatgcgttcggcgctgcccacgcgtttttgatggtgggcggcaccaccagctcggtgcaaagcatggtgctgaccgcctgcaagcgcggggatgagatcatcctgccccgcaacgtgcaccgcagcgtgctgaacgcactggtgctctgcggcgctgtgccggtgtatgtcaaccccgaagtggaccagcggctcggcatcagcctgggcatgaaacgggaacaggtggccaaagccattgccgagcaccccaacgcggtggcggttctggtcaacaaccccacctattacggcatctgcagcgacctgcgcgccattgtgcggatggcccacgatgccgggatgctgtgcctggctgatgaagcccacggcacccacttttacttcggcggcggcctgccggtttccgccatggcagccggggcggatatggcggcggtttccatgcacaaaagcggcggcagcctgacccagtccagcctgctgctgaccggccccaacgtccacgctggctatgtgcggcagatcatcaacctgacacagacgacctccggcagctatctgctgatgtccagcttggatatctcccgccgcaacctggccctgcgcggccgccaggtgttccaccaggtggcagatatggccgagtatgcgcgggaggaaatcaacgccgtgggcggctattacgcctttggcaaagagctctgcaacggcaactccgtgtttgattttgatacaacaaaactcagcgtccacacgctggatattggccttgcagggatcgaagtctatgatatcctgcgcgatgaatatgatatccagatcgaatttggtgatatcggcaacatcctggcctatctttccatcggtgaccgcccgcaggaggtggaacgtcttgtcagtgccctggccgaaatcaaacgtcgctaccataccgacggcgcgggcctgttgagccaggaatacattgaccccgaagttgccgccagcccgcaggaagcattctatgcccccaaaaagagcctgcccctgcgcgaaacggaaggcatggtttgcagtgagttcgtcatgtgttatccgccgggtatccccatcctggcgccgggcgagcgcatcactgctgagatcctggattatatcgaatacgccaaagccaaaggctgcagcatgaccggaccggaagatcctgacattctgcgcctgaacgttctggcctag

SEQ ID NO: 576 - DNA, 7570 bp, unidentified
  source 1..7570: mol_type = unassigned DNA
  misc_difference 2942: note = a, c, g, or t
  misc_difference 2943: note = a, c, g, or t
  misc_difference 2944: note = a, c, g, or t
  misc_difference 2945: note = a, c, g, or t
  misc_difference 2946: note = a, c, g, or t
  misc_difference 2947: note = a, c, g, or t
  misc_difference 2948: note = a, c, g, or t
  misc_difference 2949: note = a, c, g, or t
  misc_difference 2950: note = a, c, g, or t
  misc_difference 2951: note = a, c, g, or t
  misc_difference 2952: note = a, c, g, or t
  misc_difference 2953: note = a, c, g, or t
  misc_difference 2954: note = a, c, g, or t
  misc_difference 2955: note = a, c, g, or t
  misc_difference 2956: note = a, c, g, or t
  misc_difference 2957: note = a, c, g, or t
  misc_difference 2958: note = a, c, g, or t
  misc_difference 2959: note = a, c, g, or t
  misc_difference 2960: note = a, c, g, or t
  misc_difference 2961: note = a, c, g, or t
  misc_difference 2962: note = a, c, g, or t
  misc_difference 2963: note = a, c, g, or t
  misc_difference 2964: note = a, c, g, or t
  misc_difference 2965: note = a, c, g, or t
  misc_difference 2966: note = a, c, g, or t
  misc_difference 2967: note = a, c, g, or t
  misc_difference 2968: note = a, c, g, or t
  misc_difference 2969: note = a, c, g, or t
  misc_difference 2970: note = a, c, g, or t
  misc_difference 2971: note = a, c, g, or t
  misc_difference 2972: note = a, c, g, or t
  misc_difference 2973: note = a, c, g, or t
  misc_difference 2974: note = a, c, g, or t
  misc_difference 2975: note = a, c, g, or t
  misc_difference 2976: note = a, c, g, or t
  misc_difference 2977: note = a, c, g, or t
  misc_difference 2978: note = a, c, g, or t
  misc_difference 2979: note = a, c, g, or t
  misc_difference 2980: note = a, c, g, or t
  misc_difference 2981: note = a, c, g, or t
  misc_difference 2982: note = a, c, g, or t
  misc_difference 2983: note = a, c, g, or t
  misc_difference 2984: note = a, c, g, or t
  misc_difference 2985: note = a, c, g, or t
  misc_difference 2986: note = a, c, g, or t
  misc_difference 2987: note = a, c, g, or t
  misc_difference 2988: note = a, c, g, or t
  misc_difference 2989: note = a, c, g, or t
  misc_difference 2990: note = a, c, g, or t
  misc_difference 2991: note = a, c, g, or t
  misc_difference 2992: note = a, c, g, or t
  misc_difference 2993: note = a, c, g, or t
  misc_difference 2994: note = a, c, g, or t
  misc_difference 2995: note = a, c, g, or t
  misc_difference 2996: note = a, c, g, or t
  misc_difference 2997: note = a, c, g, or t
  misc_difference 2998: note = a, c, g, or t
  misc_difference 2999: note = a, c, g, or t
  misc_difference 3000: note = a, c, g, or t
  misc_difference 3001: note = a, c, g, or t
  misc_difference 3002: note = a, c, g, or t
  misc_difference 3003: note = a, c, g, or t
  misc_difference 3004: note = a, c, g, or t
  misc_difference 3005: note = a, c, g, or t
  misc_difference 3006: note = a, c, g, or t
  misc_difference 3007: note = a, c, g, or t
  misc_difference 3008: note = a, c, g, or t
  misc_difference 3009: note = a, c, g, or t
  misc_difference 3010: note = a, c, g, or t
  misc_difference 3011: note = a, c, g, or t
  misc_difference 3012: note = a, c, g, or t
  misc_difference 3013: note = a, c, g, or t
  misc_difference 3014: note = a, c, g, or t
  misc_difference 3015: note = a, c, g, or t
  misc_difference 3016: note = a, c, g, or t
  misc_difference 3017: note = a, c, g, or t
  misc_difference 3018: note = a, c, g, or t
  misc_difference 3019: note = a, c, g, or t
  misc_difference 3020: note = a, c, g, or t
  misc_difference 3021: note = a, c, g, or t
  misc_difference 3022: note = a, c, g, or t
  misc_difference 3023: note = a, c, g, or t
  misc_difference 3024: note = a, c, g, or t
  misc_difference 3025: note = a, c, g, or t
  misc_difference 3026: note = a, c, g, or t
  misc_difference 3027: note = a, c, g, or t
  misc_difference 3028: note = a, c, g, or t
  misc_difference 3029: note = a, c, g, or t
  misc_difference 3030: note = a, c, g, or t
  misc_difference 3031: note = a, c, g, or t
  misc_difference 3032: note = a, c, g, or t
  misc_difference 3033: note = a, c, g, or t
  misc_difference 3034: note = a, c, g, or t
  misc_difference 3035: note = a, c, g, or t
  misc_difference 3036: note = a, c, g, or t
  misc_difference 3037: note = a, c, g, or t
  misc_difference 3038: note = a, c, g, or t
  misc_difference 3039: note = a, c, g, or t
  misc_difference 3040: note = a, c, g, or t
  misc_difference 3041: note = a, c, g, or t
  misc_difference 4833: note = a, c, g, or t
  misc_difference 4834: note = a, c, g, or t
  misc_difference 4835: note = a, c, g, or t
  misc_difference 4836: note = a, c, g, or t
  misc_difference 4837: note = a, c, g, or t
  misc_difference 4838: note = a, c, g, or t
  misc_difference 4839: note = a, c, g, or t
  misc_difference 4840: note = a, c, g, or t
  misc_difference 4841: note = a, c, g, or t
  misc_difference 4842: note = a, c, g, or t
  misc_difference 4843: note = a, c, g, or t
  misc_difference 4844: note = a, c, g, or t
  misc_difference 4845: note = a, c, g, or t
  misc_difference 4846: note = a, c, g, or t
  misc_difference 4847: note = a, c, g, or t
  misc_difference 4848: note = a, c, g, or t
  misc_difference 4849: note = a, c, g, or t
  misc_difference 4850: note = a, c, g, or t
  misc_difference 4851: note = a, c, g, or t
  misc_difference 4852: note = a, c, g, or t
  misc_difference 4853: note = a, c, g, or t
  misc_difference 4854: note = a, c, g, or t
  misc_difference 4855: note = a, c, g, or t
  misc_difference 4856: note = a, c, g, or t
  misc_difference 4857: note = a, c, g, or t
  misc_difference 4858: note = a, c, g, or t
  misc_difference 4859: note = a, c, g, or t
  misc_difference 4860: note = a, c, g, or t
  misc_difference 4861: note = a, c, g, or t
  misc_difference 4862: note = a, c, g, or t
  misc_difference 4863: note = a, c, g, or t
  misc_difference 4864: note = a, c, g, or t
  misc_difference 4865: note = a, c, g, or t
  misc_difference 4866: note = a, c, g, or t
  misc_difference 4867: note = a, c, g, or t
  misc_difference 4868: note = a, c, g, or t
  misc_difference 4869: note = a, c, g, or t
  misc_difference 4870: note = a, c, g, or t
  misc_difference 4871: note = a, c, g, or t
  misc_difference 4872: note = a, c, g, or t
  misc_difference 4873: note = a, c, g, or t
  misc_difference 4874: note = a, c, g, or t
  misc_difference 4875: note = a, c, g, or t
  misc_difference 4876: note = a, c, g, or t
  misc_difference 4877: note = a, c, g, or t
  misc_difference 4878: note = a, c, g, or t
  misc_difference 4879: note = a, c, g, or t
  misc_difference 4880: note = a, c, g, or t
  misc_difference 4881: note = a, c, g, or t
  misc_difference 4882: note = a, c, g, or t
  misc_difference 4883: note = a, c, g, or t
  misc_difference 4884: note = a, c, g, or t
  misc_difference 4885: note = a, c, g, or t
  misc_difference 4886: note = a, c, g, or t
  misc_difference 4887: note = a, c, g, or t
  misc_difference 4888: note = a, c, g, or t
  misc_difference 4889: note = a, c, g, or t
  misc_difference 4890: note = a, c, g, or t
  misc_difference 4891: note = a, c, g, or t
  misc_difference 4892: note = a, c, g, or t
  misc_difference 4893: note = a, c, g, or t
  misc_difference 4894: note = a, c, g, or t
  misc_difference 4895: note = a, c, g, or t
  misc_difference 4896: note = a, c, g, or t
  misc_difference 4897: note = a, c, g, or t
  misc_difference 4898: note = a, c, g, or t
  misc_difference 4899: note = a, c, g, or t
  misc_difference 4900: note = a, c, g, or t
  misc_difference 4901: note = a, c, g, or t
  misc_difference 4902: note = a, c, g, or t
  misc_difference 4903: note = a, c, g, or t
  misc_difference 4904: note = a, c, g, or t
  misc_difference 4905: note = a, c, g, or t
  misc_difference 4906: note = a, c, g, or t
  misc_difference 4907: note = a, c, g, or t
  misc_difference 4908: note = a, c, g, or t
  misc_difference 4909: note = a, c, g, or t
  misc_difference 4910: note = a, c, g, or t
  misc_difference 4911: note = a, c, g, or t
  misc_difference 4912: note = a, c, g, or t
  misc_difference 4913: note = a, c, g, or t
  misc_difference 4914: note = a, c, g, or t
  misc_difference 4915: note = a, c, g, or t
  misc_difference 4916: note = a, c, g, or t
  misc_difference 4917: note = a, c, g, or t
  misc_difference 4918: note = a, c, g, or t
  misc_difference 4919: note = a, c, g, or t
  misc_difference 4920: note = a, c, g, or t
  misc_difference 4921: note = a, c, g, or t
  misc_difference 4922: note = a, c, g, or t
  misc_difference 4923: note = a, c, g, or t
  misc_difference 4924: note = a, c, g, or t
  misc_difference 4925: note = a, c, g, or t
  misc_difference 4926: note = a, c, g, or t
  misc_difference 4927: note = a, c, g, or t
  misc_difference 4928: note = a, c, g, or t
  misc_difference 4929: note = a, c, g, or t
  misc_difference 4930: note = a, c, g, or t
  misc_difference 4931: note = a, c, g, or t
  misc_difference 4932: note = a, c, g, or t
ttattttatggcatcgagtgcgtttgagatatctgcaatcaaatccaccttgtcctcaagacctaagcttattctgataagctctgccggcactcctgcttccttaagctgctcatcattcatctgacgatgcgtgcttgttgccggatttaagcagcaggttctcgcatctgccacatgtgtctctattgcaccaagctttaatgccttcataaatgcagacgctgcctctctgccgccctttaagccaaatgatacgactccgcagcctccgtttggaagatacttctgtgctctctcatagtatttgtttgaaggaagccctgagtagtttacataggcaacctttggatgattttccaaaaattcagccactgcctgtccattttccacatgctttggcatacgcacatgaagtgactcaaggccaagattcagcataaatgcattctgtggtgactgcatagaaccaaaatcgcgcataagctgtgctgtacatttagtgatgaacgcaccttccttgccgaacttctctgcatatgttatgccatgatagctgtcatcaggtgtgcacagtcccggatatttatctgcatgtgccatccagtcgaatttgccgctgtctacgattgctccgccgagtgtggctccgtgtccgtccatgtactttgtggtagagtgtgtgacaatatctgcgccccactcaattggtctgcagtttacaggtgtagggaaggtattgtccactataagcggtactccgtgctcgtgtgccacctttgcaaaaagctctatatcaagcaccgtaagcgcaggattggcaatagtctcaccaaacataagctttgtgttcggtctgaatgctgcattcagttcctcctctgtagcatcaggagatacgaatgtagctgtaatacccatctttgccatagttaccgcgatgaggttgaaggtgcctccatagatggatgatgatgccacgatatggtctccgcactcacatatgttgaacatggcatagaaattggctgcctgtcctgatgatgtgagcatggcagcagtgccaccctccatagctgcgatttttcttgctaccgtgtcacaggtcggattctgcagtctgctgtagaaatagccctctgcctcaaggtcaaaaagctttcccatgtcctcgcttgtgtcatatttgaatgtagttgactgaataatcggaatctgtctcggctctccgtttccggctgcatagcctgcctgtacacactttgtacctatactgtattctttcattgtgcttctcctttattatgttaatgtttcagttggatatagtatattacatttggcgcgttttgacaaattcagattatataacttttgtcaccataaattcttatgctttataacatattgtatctaccagtgcttcatagctgctgtcatcagcttgcagtatctctctgacattgtgctgctctaatgctgctgtcgttttttcacctatcgagtatgctgtttccacgtatgtattctccggcagcatatgaaaaaatctttccacatttgatgcgcttgtaaaaacagcttcacttaccatgtttccaatgctttcaggaatactctcatatgcctgctcatttacatatgcatcaattttttctaattcacatatttctttaagccctgcctcaaggtcaggtgaagcctcctttgccgagaaaatgcagactttgatttcatcattatcgcccatatacgaactcaattctcctgcaagtccttttccggtctgttctgccggaataatatctgcctttatatgatgctttgcaagctctttttctgtagcttttcccactactgcaaaccttgcacttgctatcagcctgatgtctgcccctgccagctccagattatagaaaaatgatcttacaccatttttgcttgtaaaaacaatccagtctgccgatcttaccttatcggcaaattcaggaattataactggtttaattatgcctgtcttaaccggtgtgacatctgctccaagctgctgtaattttgctatcaattcgtttgttttgatatatggtactgtgatttttcttccaaacagcggtcttttttcaaagaaatcaagcctgtcattcagtgaaaccacatctcccacaacgattatagccggtgatgtcagctttgcttcctgaatcttttctccgatatccgcaagcgttcctatgcatttgcgttgcgcggcaagtgtaccgttcgatatcactgctgccggagtatccgctcttcgtcctgctttcataagccctgctgcaatgctttttacatgcgcaagtcccatcaaaaatacgcaggtgattgtctcatctgtaagaagggaatagtctatatctgcctcctcatcctttctgctgtgcgcagtgatgacctgaaagccttttgctatgcctctgtgtgtgataggtattcctgcagccgcaagcgctgcaaccgatgaactgacacccggtaccacttctacctccacatttctatctaccaggtagagagcttcctctccgcctcttccaaagacatacggatctccgccctttaaccggactacaagctcatgatattttgatttctcgtacaaaagctcgtttatggcgtcctgcttcatgacatgcttgtgattttccttgcccacataaataagctcacagcctgcctttgccattgaaagaaactctggtgatgacagcctgtcatacaccagacaatccgcctgttttatatatttttctccttttaaagtgagcaggcccgtatctcccggtcctgctccaactaatactacttttcctgtgttttctctcatgattttcctaattactttccaatttataccgaatatcgtgcacggcacgctccacaatatcgtttctgtctgatgnnnnnnnnnnnnnnnnnnnnnnnnnnnnnnnnnnnnnnnnnnnnnnnnnnnnnnnnnnnnnnnnnnnnnnnnnnnnnnnnnnnnnnnnnnnnnnnnnnnnaatttataccgaatatcgtgcacggcacgctccacaatatcgtttctgtctgatgtcatatcccatacctgctctgtccttgcaagctgttttccatcctctgagccaaacatcgcaagaagctttagcctgttatttttgttgctgtcattaccgcggtctttttcacttacaatatcacagtatgcagccacaggcagatggcagtttccaccgattcgctttaaaaattctctctcaatgcctgcgcacagattggttttctcatctgacaaagtatcaagctttgccatcagcttagcattgtcagcacgtagctcaagcgccagtgtgccctgtgccggagccggaatcatatcatcctctgaaaagtactgtgtgatctcagaatctcttccgatacgctttattcccgccgctgcaagtacgattccatccagcctgtattcgttatacttattctgtttttcgttagctatctcattgttatttacagtattatcggcaatctcttcatatataatttcaccatcatatagcttacgaagcctcgtatcgatatttccgcgtatgccaaccaccttaaggtcaggacgcagctttaaaagctgatactttctgcgcttgcttccggttcctatcacggcaccatgaggaagctcatccagtgaagcggcattttttagcaccaaaacatcccttggatcttcacgcttccatgcctttgcaaatgtaagccctgctgccggttcatcaggcatatccttcatggaatggactgccatatgaatctttcccgataaaagctcgtcctctatctcctttacgaagataccctttgagccaatcttatcgagtgcctttttctgctctaaatcgcctgttgtctttatgataacagccttaaaatcatcatccggatatgctctttttaacttatctatcacgtaatcagtctgaacacgagcaagctttgagcctctcgttcctattaaatacctcattttactctcctacggatcatgccattttccatttataatttataaatgaacaacaacttaaaatctgtaataccatactttaaactatatttccggaattcttccattatcaatagctgcacacaagatttctttaaacacacgctttctctcggcttcagtgtcatattgcgctattacttttttgcggatctgtcccatgtattcgttcagctcaccaagaaacggagtaagaatctcctgctctttgcctttcagatactgagtcagcacagggctgtttcctccgctcgaaaatgccgcaacaagattcttttcctttatgtatgacggaaaaataaagctgcaatcagccttctgatcgaccgcatttaccatgatgtccttagctttgcaatactctgcaatctcatgatttaaagcattgtcatcagtggcagcgatgaccatttccatgccgtcacagtcttttcgttcaaaccttctctttatgaatgtaattctatctgctgcatccgggtccgtctgattgttttctttatttgccgtatatgagcccgttttatcctcgcttgctatatcatcaattgtaagctttctcagctcatcacatatattctctgccacaaccgtgaccttcgcgccaaaatccagcattacgatcaccttgcggtatgccacatttccaccgccgacgatcagacactctctttccgtcatatccacaaacatcggaaaatacgccatttttatctccctgtaataccatatccatactttatttcatnnnnnnnnnnnnnnnnnnnnnnnnnnnnnnnnnnnnnnnnnnnnnnnnnnnnnnnnnnnnnnnnnnnnnnnnnnnnnnnnnnnnnnnnnnnnnnnnnnnngctttatgctttattttttgccttatgcttcacactgtatccattgagcattccttcaaaaacaggacgaagcttggctgaaaacactgctgccgatacgcataatataaagtccggtgcaacagttatcagacagtaatccactattactatgccccagctgacaggtgttgccgcatagaaattcttcatgcagtaaaaatatattgctccaactgtataatatgccaccagtccgaccgttgccggaagaataagtgtaaacgcattggtctttttaagcttttctgtgatagctccgattaaaaatgcggcaagcacaaagcctaagaggaatccaaatcccggtcttaaaatgtatgtaggaccgccgcctgctgcaaatacaggcactcccaccagtcctatgcacagatacactatcacgctaatcggtgcaagctttgccccgagcaaaaatcccgccatcagcacaaaaaaccactgtaatgtaaaatgcatggtgtacataggaagcggaatatcaatcttgataaatgctccaactgctataagcgccgcaaaaagtgcacatgttgtaagttccttcgtttttaatttcattttcgcacgctctttcgttttattaaatatacatgctataataacatctttctctaaaaaagaaaagccatcttcgatgaagctgacttttctttgcagctttcgctgcgactcaaaacattaacatatgatttagaagtaatattcatcagaatatattcgtaaatcctctttcgtgacctgtccaccctcgatatgaaacgagttgattacaggattttctgccataagcgacattatcatgtagctcgcattcggatcgtatgcaagctttatatcctcatccgatggccttgaagggctagacggatgtgaatgccagttgccaagcggcttaaggccgtttgctctcatgtcctttatggctgccagctgctcctttggatccattgtgaaatggtcctcggcatggtctgtattcgtcaggtaatatacctttgtgatgagacgaccgttttcgtcctcactgcctgctatcagaccgcacgcctcctccggcagatgctctttagcatattttgctatttcatccagaaacggatatttcattcttatgatactcatatcgttcctttccttactgtctttttattcctgtgtacgaggtgcatcaaatctgcccgctgtctcctcgcagacctcctgctcgtagtcgattggctcgagaatagtcggatggtcgccacagactgcacagttgtgtgtatcctttggaagcttaatcttgtggaactccatggtgagtgcatcatatgtaagcagatatcctgtgagcagctctccaacaccgattaaatacttgatagcctccatagcctgaagcgaaccgattactccgcccatagctccgataacacctgcctgcttacatgtaggcactgcatcctttggtggcggattcttgaatacacatctgtagcaaggtccctctcccggcacatatgtcatgagctgacccttgaaacggatgattcctgcatgtgaaaacggctttttctcaagcacacatgcatcgttgattaagaactttgccgggaaattgtcagttccatcgatgatgaaatcataatccctgataagctctctgatgtttgacgcatctacaaacatacggtatgtattgacctgaacgtccgggttcatggcgttcattgtctcttttgctgactttaccttggctttgcccacatcggctgttccgtggataatctgtctctgcaggttggataaatctacctcatccgcatccacaatgccgattgtaccgacgcctgctgccgcaagatacatggctgccggagctccaagtccgccggcaccgataataagcaccttgccctttaataatttcttctgacctttaacgcccacctcattaaggataatgtggcgtgaatagcgctcgatctgctcatcagtcattgccattagcatccacctcccatgaagtaaaggaactctacattgtcgccatccttaagcactgtctttggcttatcctctgtggcaacaaattcctcatttattgaaactgttacatactcaggcatatctacattctcaagctcgataagctccggtaatgtaagtccatccttatattctttcttctctcctgctactgtgatagtcattttatttcctcctgtgtcacagattgtggtatctgtaagtgttattatcctgtatcagactgctttatataataatctaaaaactataataatgctttaacccacgccttcaaatcggcaggcttttgtacgccgacctttctgtctaagacctctgcgtcttttacgaaaagcagtgtcggattcgcagtcacctcatactcatcagcgagctctccgtcaaagtttgtgttgaccttgtatacgtgaagcttatcctcataatcatcctcgatatctccgagaaccggtgccagcttcttgcaggccacacatgaatccgagtaaaaatcaacaattaccggaagcttgctttttaatactttttcatcgaaatcagcctttgaaattcttgctgccat

SEQ ID NO: 577 - DNA, 6247 bp, unidentified
  source 1..6247: mol_type = unassigned DNA
atgaatatgacaacaaatgtaattaacaagggttggttcaatcccatatccctttccgtattgctgatactggttatcgtatcagccgttttgtatgtttcgaagattataaacataccgatattcatcctcttgcttcttctttccgggttggtgacttctgcaatccgcatagccgaccaatgggaacgagcggtagtccttcgtatggggaaatacaacggtttgaaaggtcccggcccctttatgattatcccggttatagacagtgtatcgacttatattgaccagcgtgtacgggtaagtgcatttaaggccgaacaaactctaaccaaagatacggttccggtaaatgtggatgcagtcgtatattggaccgtctgggacgtggaaaaagctgcattggaagtacaggagtaccaaaaagcgatcgaacatatcacacagactggtctaagagataccatcggtaagcacgaactgtcggatctcttgcaggaacgcgataagatagctgaggatttgcaacaggtcttagacagaaatacgaatccgtggggcatcacatgccagactgtcggtatcaaagatatcgccattccgcaagacctggccgaagcaatgagcaaagaggcccaggccgaacgtgaaagaagagctcgcgtcatcttgggaacagcagaaacggaaatcgcagaaaagttcgaacaagccagtaagaaatataccgacaatcctgtggcattgcatcttagagggatgaatatgctgttcgaaggcttaaaagaaaaaggatcgatggttatcgtaccgagttcggcactcgacaccatgaacttaggggctatgggaggcttggtttcattggctaagaacaacgagacaccgaaataaactattttctaacaacaaaaaatcaccatttatggaaatacacaaacaagggattacttttgtactccttctattaatctttacaaattgttcacgaaaaccatcgctgcaatggattcccttcagttgggaaggtgatacaatttcggggatatacattgaaaaagcttttctaaatgttccggtaaaaatagagaatttaccctacgaattcacaatgcagtttgatttaggagcatataattctgtcttttacgggaatacttttgctccttatctcaaagaagccccatctttaatgaacaaaaaagattcaaccgggatgtataagaatgtcaacctgcaaatagggacagtggagtttagcaatgccaatatcggattcatgcagaatttcggaaataaaatccctaaagattcacttcattcaaatacccccaagcatattggaacgatcgcatccgacatggtgcaagataaagtcttaatcattgattacaaatcaaacaggcttgcaatcacagactttttaccggctgaatacgaaaatctgctggctgaagaatttgaatcagaatatggggaaataaaattgcctttacggattaatggaaaaacatgtaaagtattgttcgatacaggttcaagccctttccagttaataacgacacaagaaagagcttggagcgtatcagaccttactattgtcgactctctaagcggtcctttatggtggggacaagaaataacattttatggctttaatgtaaccaaaccgatcgagttcggcggaaaagccttgaacaattcgaaagtctactacgccaaagacggcctttgggatagtatttatagtaccctcgatgtctggggaataaccggaaatgcttatttctttgaaaacaccgtgattatcgattacaaaaacaaactattcaggataaaataaaaattcgaacccatacttcttcattcagatgcaagcgtaagttgttttctacattgccgtatatattcccgacaacgtcaaatatattctcgacaacgtcgaaaacaacttacacttgcatcaaaacaaaaacacattgccatcttacatcaaacctttgccagagcttggtctaggtcatcaatgatatcatcgatatattcagtacctatactcaggcgcacagtggaaggagtgatatgctgtccggccaactcttccggagtcatttgagaatgggtagtcgtatacggatggatcaccaggctcttcacatcagccacattggcaagaagggagaatatttccagcgaatcgataaacttccaggccgcttcctgcccgccttcgatctcgaaagtgaaaatacttccggcacctttcgggaaatactttttataaagttcatggtctggatggtctggaagagccggatggttcactttggttactttcgggtgtttggataaatactcgacgactttcagagcattggcaacatgacgttccacgcggagagacaatgtttccagaccttgcagcaggataaaagcattgaaaggcgagatcgtagctcctgtatcacgcagaatgacagcccggatacgagtgacgaaagctgtcggacccgccacatcggcaaagaccgccccatgataacttgggtccggtttgcccaaggtcgggaacttatcggcatttgctttccaatcgaaattgccactgtccacaatcactcctcccaagctcgatccatgtccgccgataaatttggtggcggaatgaacaacaatatcggccccgtgctcgatcggacggatcaggtacggtgtaccgaacgtattatccactatcaacggaatattatgacgatgggccacctccgccacagcatcgatattggtaacatcagaattaggattaccgaacgtttcgacatacaccgctttcgtattctcccggatagcagcctccaacgcctgcaagtcattgacatttacaatcgtgtgggtaatgccctgagtcgctaacgtatgcgtaatcagattgaaggaaccgccatagagattgtcggcagccacaatatgatcactcactccaagtatattctgcaaggcatacgtcacggccgccgcaccggaagccaccgccagaccagccactcccccttcgagagcggcaacacgcgcttcgaaaactccctgggtcgaattggtcaggcggccataaatattcccggcatcacgaaggccgaaacggtctgccgcatgttgtgaatcatgaaatacataagatgttgtctgataaatagggacggcacgagcatctgttgcgggatcggcctgttcttgccctacatgaacctgtaatgtctcgaaatgtaatttctttgttaccatagtcgtattattttaaattgttcttcttgctcattttccagcaaaactatagcagacagagatatcagacaagatatatggaaaatacagaaaataacgctatttttacggtcgtcaacagaacgcataaactgtatcaggatcgaaaaaaggattctgatagaattttattcttatgaacacacttgagaaattagacaaagtagacttgcagatcctccgtaccctgcaatcgaatgcccggctcaccacaaaagagctcgccgcgagtgtcagcctctcgtcgacacccgtattcgaacgcctgaaacgcctcgaaaacggaggatatataaagaagtacattgccgtgctggacgccgaaaagctaaaccagggcttcgtggtcttttgcagtgtcaagttgaggagactgaacaaagagattgcggcggagttcacaagaatcatacaggaaattccgcaagtcacagaatgctacaatatatcgggaagttacgactacctgctgaagatccatgcaccgaatatgaagtattaccaggagtttatcttgaacgtgttaggcacgatcgacagcctcggatcgctcgaaagcacctttgtgatggacgaggtaaagcatgaatacggaatccatatttaaacgccgccccgtccctatcttacatttattacttcaatgcataaatccgctggatgatgtccacaaccttcatgccttccaatacgttggtcgtaatacattccgaacttgcaccggaaaggacacggaccacattgcggatcacgaaattatggttctgggcggaacctttataagggccgtagtcatttcccggattcgtcggcgccagttccggcatttcataatctttgatatggcagtattcgacttcgttcatatactgtccgccgattttcacgcttccgttctccgcaacaatcagcatactgctttccatgttcctgttccagacagaagtggaatagctcaggctccccatcccgccgttcacgaagttgaaattcacaaagcccgaatcttcaaaagccgtaagtccggcatggttgaaatcggcaaagcgagcctggatattgcagatatccccgaaaagccagtacataatgtcgataaaatgggagaactgggtaaaaagcgtccctccgtccaaagcggcatcgccatgccagccaccgggtttataatagcgctcgtcacggttccaataacaattcaactggaccatatagatcttgcctaacctacccgaatccaccatctccttgatccagacggaaggaggagaataacggttttgcatgacgcagaacacctgtttacggtatttcagcgaagcatagaccaccttctcggcatcggcaagcgtcagtgccatcggcttctcgatcacgacgttgcaaccggtttcgacagcctgaatggccattgctgcatgcaagccgttcggggtacaaacatttacgacatctatggaaattccgctctgcaatagctccgtcagggatgaaaaaaacgggacatcgtatgcctcaatacccaattcctcacagggacgaatatcacaaagggccaccaattcggctcccggatcgcgtgtcaccatctcggcatgacgtttgccgatatggccacaaccgataactgcaaattttatctttttatccataagcattcgatggggggggtgtcaaaatctccttgtccccgtgcttgacgcggggccgcaaaaggacagaccttatcaatcagatttttatagggtcggttctaatgcgatcccacgtcaagcgcgggaacaggatagtttcgacacacccccttttttagagtttctgttatatattgctgttgtccgagggacatttccgtatgaataggcagggaaaggacggattcgcacaaacgggtggagacgtccaaattgccggatacacgggagatatgccggtaagcttcctgatgatgcactggtacaggataatagatcatggaagggattccctgttctttcaacaggcattgaaggacattccgcctgccgtcttttacctggaccgtatattggtgatagacatgagtcgaaaatatcgatctcgcagggagaaccaacgaatcgcaggaggacaaagcttcatcataccgagaggcaacttgccgacgggtttccgtgaactcctccagatgcttcaacttcacatccagcacagcagcttgcaacgtgtccagacgggagttgcatccgatccgcctatggtggtatttgcattcctggccatgattggcaatcatgcggatacgggcagccaacgcctcgtcggaagtcatcaacgcccccccatcgccatagcaggccaacggcttggatggaaaaaaagatgtcgtcccgatatgtccgatcgtcccggcctttcgtacccgcccgtcggaaaagatataatcggcaccaacagattgagcgttatcttccactacatacagatgatagacatctgccaaagtcatgatcggctccatatcgcaggcttgtccgaacaggtggacggccacgaccgcctttgtccgttccgaaacagccgcttctattttccggggatcgatattaaaggtacagggatcgacatccaccaacacgggcgtcaaccctaacaaagcgacaacctcggctgccgctatataagtaaatgccggcagaatcacctcatcgccaggctgaagctccaatgccatcagagcaatctgcaaagcgtccgtcccgttagcacaaggaatcacgtatggaacctgaagataatcagccaaatgcccggcaaaggatttcacctgcggaccattgataaaagcacaactgtcgatcaccgcctgcatggcctcatcaatctcctctttgaaccggagatattgtccatgcaagtcgaccatctgtatctgttcttccaacat

SEQ ID NO: 578 - DNA, 5467 bp, unidentified
  source 1..5467: mol_type = unassigned DNA
tattcacccactgaatccgaagttatgatgaacgagaacaacgatgtttttacaatggaagacgagccgatagcctctgttatgcagaatatgcgcaaaggctcgaaatggctgtccgcatttctggaaagttaccgtcctccgttggacggggagcgttacctgacggacggcgaggtgtcggaactgctccgtgtgagccgacgcaccttgcaagaataccgcaacaaccgcgtgttgccctttatccttttgggagggaaggtgctttacccggaaacggtgctgcgcgaggtgctggaagcgaactaccgcaagccgttatgatgttgattttgtagttagaaataaaaagattacttttgcaatctgtttacgcttagtcgtaatcacttgctcaatctcatgtgcgcttgggtttccaatgccatcgtacttccagctcgttctgggagcagtttcattctttaatacgttgggaaaggggggctttaagtatgacaaaaactataatgaaggcggtaggggctgtagcggcaggccgaaacaggaaagttcatatgaggatagcaagtgtaaccatatattgcgatgaaggctccaagggttcgaatcctgccaccccgacaaaagccactgataatcagtggctttttcttttttcggacacatttcggacaaattatatctgaatattgattattcaataacctaagcaaagttaagttaagctagaagaataacccttcttaaagaatgattggaacataatgcttgtttctatagagcgtgaaaagttcatcttattcttataaaaaatcaagagggctaggagtcttttgcttgtctatgtcagtgatatgagtgtagatcatagtcgtttttatattttcatgacccaataactcttttacaattcggatatcgatacctgattggattaaatgtgtggcataagaatgtcgcccagtatgtacagagccttccgactgaacatttgctttgatcaatgcttttttcagaatcaactgtacacttcgttcgctatacttgccacccttctcaccttcgaagaggtactcctttggcttgaatgcttgataataatgtctcaaagtcgccagcaatttgtctggtaatgatacaatccgatctttattacctttgctttgatggattctgataattccatcggaagattttatgtctttgattttgagattcaacagttcgctaagacgtagtccacaactatagattgtcatcagaatagccttgtgttttagattttgagtgttatcgagaatatttcttacttcttcttttgaaaagaatttaggtaatttagaaaatgagcgtttcgggtataagtaatccagttggatttttttgtccaatatcagttcgtacatcttcttgattgcgcccactaatcctttttgataggaaacactaattttcccattttgaactttttcgtttataaacgcctcaatatctgacagtggaatttcttcaagggagggatatttactaacatgtttaagaaatatactagcgtaatccttgtacgatctaatggtattgccagcatatctctgcatcagcaatctcttttcgaaggtttcaagtatgatttcgctattcatatcagggaaatagtattttataatattttgtttcgctatttgtgcggttttattttttaaatacaaatatatcaatatcttatgtagaaagaaaagtcaaataacgaaacacgtatatagggttggttaagcgaaattttccgtatattcgtttcgttaaaacagatgttgttatgcggcagcttaaaagacgacaccaaaccagaaaaatcatcttgacaaccacccgactttgaactacgaaggatgaaatttttcagggacaacttccagcatttccaaaaaacagtttaaccattgacttggagacaaacaaacaatttgagcattaaggtttaaaccgaatttttccgaaattgtcctgacctgacttttcctgaaaatcgactttaaagctgtttttacagataaatcaggtttctctaacagacaggaaataaatgctaagtatttggctttaatcttaaaatcaaaaaataagtgttttcttttaatgtttaacagggctgattttacagttggcggtggcaagaaactttcaggacctacctcatagacaagtttcaaatcaaaaaaagtatgatagaaaacggtatatggattgtaaagcttccttgaaaataacttttatgtaggttcgaactgaaggacaatggaacctcccagaaaattttcaagattctcaaacatcaggattttgaaaatatcggaagtaatgccataaggaatatttgacaccactttgaaaggaaatttcggaactgcaaaattcctaaaatcacaaccgacaacttgaacatttcgggcatcagaaaataattttcgtaaatgttcaaccaaagctgtgtcgttttcaatagcaacaacattgttggcaatttttaataaatgaacagtaagaaaccccttgcctgccccaatatctaaaaccgtatcctgattacttatatttgcttgtcttattgcatcttttattagcactttatcaatagtaaagtgctgacccgtaaaacgaacgggcaatttcttttttgtcattagtaacttcttacaggtgaatacttgaattcaaatcacagagatattcttttataattatacaacggcaaatttagtaactttgctcgataaattaacgagaaagaagaaaaaatgaaagccgacagcataacatcacctatacgcaagcaggggtttcgtgcttctatgacagtgaagtggtaaatttgaagttcagttcttcgtaggaagttcagtggttaaaatccctgcctgcgtatagctgagaaccgttgtgggctattttgcacacgacacgacaaacatcaaatgactatcgaaatatgagtttattaaacaataaaaaagttgcaattatcggtggcggaccagttggactaacaatggcaaacttgttacaacaaaacggtattgacattaccgtttacgaaagagatgaaaacccaaaagcacgagtttggggcggaacgcttgaccttcacaaaaattcaggacaagaagcaatgaaaaaagtaggattgttgcaaacctactatgatttggcgctacctatgggcgtaaactttgctgatgagaagggtaacattatagcaacaagaaacccgacactcgaaaataagtttgacaaccccgaaataaatagaaacgcgttgcgaaaaatgttgcttggcagcttgaaaaatgacacagttgtttgggatagaaaatctattgggcttgaacaagaaaacggaaaatggctgctacattttgaaaataagccaactgcattggccgactttattattgtttccaatggtggaatgtctaaaataagaaattttgtttcagataatgaagtcgaagaaacaggtacttttattattcagggcgacattcctgaaccagaaacgaactgccctgaattttataagttgtgcaacaacaatagactaatgaccgcacatcaagggaatttattagttgcgaatccatttaacaacggaatgttaacttacggtgtcattttcaaaaagcctgaagaatggaataatggaaaaggattagattttaaggacacaaaaagcgtttccgagttcttgacaaacaggttttcaaattggagcaatgaatacaaggagttaattcgttcaacaacttttttcgttggtttaacaataaaaatatttccgctagacaaaaagccttggaagagtaatcgtccgttacccataactttaattggcgacacagctcacctaatgccaccttttgcagggcagggcgtaaacattggactaatggacgctttgattttgtcagaaaatcttacaaacgggaaatttggaacgatacaaagtgctattgatgactatgaacaacgaatgtttgtttacgcaacagaagcacaagcggactcgacaaagaatgaaatagaaatgcgaaatccgagctttacttttcaacagctaatgaatgtataactcgacagacaaaaaaaacagcccacaacaatcggcttgaaacgcaaggcggggtaaacgtcttcgattgaacatttttttctaattttacggtatcggcttcgattgaaaggtagtggtaaaaacccgccctgcgtcaagccgccggacgttatgtgccatttttgaatgacaatgcgaatagatacagacaaacaaatgaatttacttagtgataagaacgttgcaataattggtggtggacccgttggactgactatggcaaaattattacagcaaaacggcatagacgtttcagtttacgaaagagacaacgaccgagaggcaagaatttttggtggaacccttgacctacacaaaggttcaggtcaggaagcaatgaaaaaagcgggattgttacaaacttattatgacttagccttaccaatgggtgtaaatattgctgatgaaaaaggcaatattttatccacaaaaaatgtaaagcccgaaaatcgatttgacaatcctgaaataaacagaaatgacttaagggctatcttgttgaatagtttagaaaacgacacggttatttgggatagaaaacttgttatgcttgaacctggtaagaagaagtggacactaacttttgagaataaaccgagtgaaacagcagatttggttattcttgccaatggcgggatgtccaaggtaagaaaatttgttaccgacacggaagttgaagaaacaggtactttcaatatacaagccgatattcatcaaccagagataaactgtcctggattttttcagctatgcaatggaaaccggctaatggcatctcaccaaggtaatttattatttgctaaccccaataataatggtgcattgcattttggaataagttttaaaacacctgatgaatggaaaaaccaaacgcaggtagattttcaaaacagaaatagtgtcgttgattttcttctgaaagaattttccgattgggacgaacgctacaaagaattgattcatacgacgttgtcatttgtaggattggctacacggatatttcctttagaaaagccttggaaaagcaagcgcccattacccataacaatgattggggatgccgcacatttgatgccgccttttgcagggcagggagtaaatagtgggttggtggatgccttgatattgtctgataatctagccgatggaaaatttaatagcattgaagaggctgttaaaaattatgaacagcaaatgtttatctatggcaaagaagcacaagaagaatcaactcaaaacgaaattgaaatgtttaaacccgactttacgtttcagcaattgttaaatgtataa

SEQ ID NO: 579 - DNA, 7708 bp, unidentified
  source 1..7708: mol_type = unassigned DNA
tcagcccacaaacacgtatttttccagccggtccatggcctcccgcaccagggaatggggcagggcggcgttgatgcggatgcagtcgccgtcgccgaagcccgcgccgctctgccagatgacgccatgctccacgccccggcggcggagatcatccggcgtgatgccgtggctgcggcaccaggccccgcagttgacgaacagcatatacgtcccctggggcagcatcatggtgacgccgggatagcggctttgcaggaagtcacggatataccgcaggttccggtccagcacggcgcacagctggtccacccacgccatgccctcgtcgctgtaggccccggtgagggcgtgcatggacagcacgttgcagtcgttgtagccggacaggtttccctgccgctggacccggcagcgaagccggtcattataaataatgtggtaagagccgatgagccccgccaggctgaaggtcttggtgggggcatagaaggccacggtgcgctcccgggcgtcccgggagacggactgagtggggatgtgggtgtatcccggcataatgagatcggaccagatctcatcggaaatgacggtgcagtcgttggcggtgtacacctccatggccttttccagctcccagcgctcccatacccggccgcagggattgtgaggggagcacaggatggccacatggatgtcgctttccttcagcttccggtccatgtccgcatagtccatgcgccagatgccctccgcgtcctgcgtcaggggcgtgtggatgatgggacggcccagccgctccagggtgtgggtgaagcccacataggtggggctgtggaccagaatcggctcgccggggcaggtcagggcctggaccacggagctgacgccgcccagaacgccgttttcatagccgatgtgctgccgctccaggccggtgacgccgtggcgcacctgctgccagcggatgatgctgtcaaagtaggcgccgctcagctgaaaatacccgaaattcgggtggtccagccgggcccggatggcctccagcaccggcggcgcggtggggaagctcatgtccgccacccacatggggatccgggaaaagccctccttgggctccaccccgtcataggggatcatgtccagggccagggcgtcccggccccgccggtccagaatggtatcgaaatcgtactgcatggttatcctccgttctccgttccggacaggtggaacacccgccgggtattttccagtatggccgcctccgcagtttccggcggcagatgcttcagccgggcgatctcctccacgatgcgcggcagcagcagggaggagttgcgcacccggctcagggattttttgctgcccgtccagggtacgtccggcagcacataggggctgtcggtctccaccagcagccggtccaggggagcgcgggccaccgcgtcccgcagggcctccgactcccggcgcagcagcgccccgccgatgcccagacagaaccccaggtccagataggcccgggccgtgtcccagtccccctggaagcagtggaccaccccgccgggcagctgacgccgcctgcgccgcagcatgaccagggcgtcctggtccgccatgcggatgtgcagcaccaggggcagtcccagccgccgggccaggcccagctgataccggaaccacagcagctgggtcagccggtgcttccggggcaggtgatagtccagcccggtctcgccgatggccgctacgccgggctcccgggcccagacctccagctgcctgcgctgccgccaaggggcctgatgggtccgggtggggtgcacgcccaccgccaggcggatgaagtccggatgctgccggtacagggcagcggttcggcggttggactcaaagtcgatggcgggctcgatggaaaggacaacgccgctctcccgcagacggttcagcaggtcctcccgctgtccctcccgggccgtcagctcgccggtgagatagcggaaggcaccgtcgaagcgcttgtggctgtagtgggcgtggctttcgatgatcatgtgcgccggtcctcctctccggggttacgcttcttccgactcctccggctgtgcaggggcctcccaggggaccatggtggccacacaccggttgatggtgactccctgctgatagaatttggcctcgtagtccgtcataacccccacggggccgtcggcgtggaggtcccgggtgacctgggacagccggaagccgaattgggggatctcctccagggaccactcgaacagcttgtcgttgtcgcttttgaagtgaatctcgccgcccatgggcagcacccggcggtataattgcaggaaattgccgtgggtcagacggcgctttttctggttacttctgggccaggggtcgcagaaattgatgtagatgcggtccacctcgccgggggcgaaaaactccggcaggcaggcggcgtcgccgtccacaaagaacacgttgtgcagccccgcgtcccgggcccgctccatggccaccaccattgcgtcggggaccttttccacggcgatcagcagcacgtccggctcggcggcggcggtctccgcggtgaagcggcccttgccgcagcccagctccacccgcagctcccgggcctccggcagcagctcccgccagcggccccgcagggctcgggggtcctcaatcagcagggcgccgcaggcttccatccggggcaccagattctttttctttctcatgcgcatgggtcatttcctcctgtgcggccatggccgcgaataaaataccaactctatatataccacaagatacacggttctgtaaacgaaaaaaatgctccatttggtgccggggacggttttgtgaccggattatgaacatgtcatattgaaaaatgcgcaaagaattttcatttcttttgtggaatatcctgaaaaagagaaaggcgggaaacaagggcttgataatttttagacgagggactataatacagactgtatgaagatcatgcacaagatgggaccgctatgggcggcatcccgtcgcgcgcccgccgctgcggcgggtgatcgaagcaaggaggaacgatcatgacgaatgttctgttggaaaagaagggccacattgccgttgccaccatcaaccggcccaaggccctcaatgccctgaactcccaggtgctggaggacatcgaccagctggtggaacaggtgaaggcggacgacgagatccgtgccctggtcatcaccggcagcggcgagaaggctttcgtggccggcgccgacatcggcgagatgagcaccctgactaaggccgagggcgaggccttcggcaagaagggcaacgacgtgttccgcaagctggagacgctgcccatccccaccatcgccgcagtcaacggctttgccctgggcggcggctgtgagctgtccatgagctgcgacatccgcctgtgcgccgaaaccgccgtgttcggccagccggaagcgggtctgggcatcaccccgggcttcggcggcacccagcgtctggcccgtctggtgggtatgggcatggccaagcagctgatctataccgccaagaacatcaaggccgacgaggccctgcgcatcggcctggtgaacgccgtgtatcccctggaggagctgatgcccgcagccgagaagatggccgagaccatcgccaagaacgcccccatcgccgtccgcgcctgcaagaaggccatcaacgacggtatgcaggtggatatcgaccgggccgtggccatcgaggagggcctgttcggcagctgcttcgagactgccgaccagaaggagggcatgggtgccttcctggaaaagcgcaagcacgagccctatcagaacaagtaaccccatttggttaattaacaggctccttaccgggcctgatgattaaaatcgctacttaaataaaaatttatttaggaggaacaatcatgaaagtcgcaatctttggtgcaggtactatgggcagcggtatcgctcaggttttcgcagcgaagggccacaccgctctgatgtatgcttccagcgttcccagcgctcagcgtcataaggacaagctggccgcctctctgaacaagaaggtcgcccgcggcaagatgactcaggaagctgctgatgatatcatgagccgcgtcctggtggaggagttcgaggccgccgccgatgccgacctggtcatcgagtgcgttgctgagaatatggccaccaagaaggagctgctgggccgcctggatgccatctgcaaggaagatgccatcttcgcttccaacacttcctctctgtccatcaccgagatgggccagggcctgaagcatcagctcatcggcatgcacttcttcaaccccgtgcccgccatgaagctggtggaagtcattgccggcggcaacacccccgccgagctggttgagaagatcaaggaactgtccgtcgagatcggcaagacccccgtggtggtcaacgaggcccccggctttgtggtcaacaagatcctgatcccctattgcaacgagggcgtttgcgttctgcaggagggcgttgcctctgcggaagatatcgatattgctatgcagctgggctgcaatcaccccatgggccccctgcacctgggcgatctgatcggctgggacatcgtgctgaacatcatggacgtgctgtataacgagacccacgatagcaagtatcgcgcaaacgtgctgatccggaagatggttcgtgccggcaagttgggcatcaagtccggcgagggcttcttcaactacaaaaagtaaatctgtaaaggagaaaagagtatggatttccatctgacgaaggaacagctgctcgttcgcaagatgtaccgcgaattcgcagagaacgaagtaaagcctctggccgctgagatcgacgaagaagagcgtttccccatggaaaccgtcgagaagatggcgaagttgggcatgatgggtatttatttccccaaggagtacggcggcgccggcggcgacgtcctgtcctatgccatgtgcgtggaagagctggccaaggtttgcggcaccactgccgttatcgtctctgctcatacctccctgtgcgccgcccccatttttgagaacggcaccgaggagcagaagatgaagtatctgcctgacctgtgctccggccgcaagatcggcgctttcggtctgaccgagcccggcgccggcaccgacgcccagggtcagcagaccaccgccgtgctggatgagtccggcgagaactacatcctcaacggttccaagtgcttcatcaccaacggcaacgtggccgacaccttcgtgatcatcgccgtcaccggcaagaccaccgacaagcgcggccgcaccatgaaggagatctccgccttcattgtcgagaagaccgacaagggcttctcccagggcaagcacgagaagaagatgggcattcgcggcagctctacctgcgacctgatcttcgaggactgcgtgatccccaaggatcgtatgctgggcaagaagggcgagggcttcaagatcgccatgaagactctggacggcggccgtatcggtatcgcttctcaggctctgggcctgggcgagggcgccgttgaggaagccatcaagtataccaaggagcgcgtccagttcggcaagcgcatctcccagttccagaacacccagttccagctggctgatatgcacacccgcatgcaggccgctcagtacgtggtgtacgctgctgccatgaagaagcagaaccatgagccctattccatggatgccgctatggccaagctgtttgctgccgaggccgcttccgatgtgacccgccgcgccgtgcagctgttcggcggctatggctacacccgtgagtatcccgtggagcgcatgatgcgcgacgccaagatcaccgagatctacgagggcacttccgaggtccagcgcatggtcatctccagccacctgggcgttaagtaattgaggaggtaaaaggtaaaatgaaaattcttgttactgtgaagcaggttcccgatacctccggtaaggtggcagtgaaccccgacggcaccctggatcgtgcctccatgcagaccatcatcaaccccgacgacctgaacgccgtggaagccgccctgtccctgaaggaccagctgggctgcaaggtcatcgcgttcaccatgggcccccctcccgcagaaggtatgctgcgtgagctgatggccatgggcgtggacgagggcgtcctgattaccgcccgcgagttcggcggctccgacacctacgccacctcccagatcatcgccgccggtatcgacacctacggcgtggaagaggacgacatcatcctggccggccgtcaggccatcgacggcgataccgcccaggttggcccccagatcgccgagaagctgcacctgccccaggtgacctacgctggcgagatcaccaaggacggcaataccctgaccgtcaagcgcatgctggaggacggctatatgaccgtcaaggtcaagaccccctgcatgatcacctgcatcaaggagctgaatcagccccgttacctgtccgtgggcggcgctttcgaagcctacagcaagcccctggtcaccatgacctatgagactctgaaggatcatcccctgatcgacaagagcaccatcggcctggcgggttctcccaccaacattctgacctcctttacgcctccccagaagggcgccggcatgatgctcgagggcgccggtaaggagactaccgacaagctggccggcatcctggccgccaagcacatcatctgaggaaggagataagaaaatggcttttaatagtgctgataccgctgccttcaaaaacgtatgggttttctgcgagcagcgtcagggcgtgatgatgcccaccacctttgaactgatctccgagggccggaagctggccgacgagctgggcgttgagctgtgcggcattctgctgggcgacaacgtggacggcatcgccgctgagctgggcgagtacggcgcggacaaggtttatgtgtacaactcccccctgctgaaggacttcaccaccgacgcctataccaaggtgatcgtggaggccgttgaggagatcaagcccgaggtgctactgttcggcgcctccaacatcggccgtgatctggctccccgctgcgccgcccgtctgcacaccggtctgtgcgccgactgcacccacctggacatcgacctgcccaactataagaacttcctaaaggaagcctccactctgcccgaggaccgcatcaacaagctgggcaccgtgatgatcaaccgggagccccatcccgtggatcgcgacctgaagatgacccgtcccgctttcggcggtcacctgatggcctccatcatctgcccccgcttccgtcccgccatggccaccgttcgtcccggcgttatgaagaagcgcctgtgcaagaagaacgtggagatcctgcaccccgccttcgctctggaggcttccgacatccacaccgaggtggtggagaccgtgaaggccgccaagaagctggtggacctgatcggtgcggacttcatcgtgtccgtgggccgcggcatttccaaggacgtggaaggcggcatcaagctggccgaggagctggctgaggttctgggcggcgtcgtgggttcctcccgcgcctgcgtggacgccggctggatc

SEQ ID NO: 580 - DNA, 6175 bp, unidentified
  source 1..6175: mol_type = unassigned DNA
ctatatgagtatcttttttccgaagaagaaaggagaaaggcatgctttatccaaacagaatgcgatgaaaatgctaccgtacagagtgatgactgtggcggtacagagaaagcatatccctgtcgggtcgaacgaaaagaaaggcagaaagagtttggacagtgcggtaaagacgggggagaaaagaagaataggcaatgtgttctttccgatgaacagtgaagcttgcttcacagtatggggaagatgtttgtagatgtacagcgaaaggctgatgaccaatccggtaattaatatgcctcctaaagtgcctctgttcagattctccggctggctgcacagaaaaaccagagggataatggcaagaaaagaagcggggaaacaagataggaacggacgttttcccagatggatagcagtgcctgccatgaaatagaaagcattggcaaatgtcagcaaatgaaagatgtaagagaaaagtaaaaggagactgcttgttaccagtaggcggataaatggagtcgaactgagataagtatgcacgaaataataggtggtgccacataatatgaatgtgtgcagataccagtaaggcccaataggatcaagcaatactttgccgagcagaactgaggcactgatttcttttatcccgtcccaaacgggaaatagcatagacatgcaggcataactgatttccataatggtgtatggaatgaatatccatgccatcgctttcagaaaaatttccggctttttatgcacgttaatcagataacccgaaatcaacaggaaggcgggcatatggaaagtatatacgatacttttggcatacggatacttacttcctatatggctcaggtgaaagatgatcatgagtatgataaacaggcatttcagatagtccagttcatggatacggttcctcatgattgtatcagataaaagcatgaggtacagaaaaaattgcgcagatgcggtatcgaaccgatgagacgtagcaatttacgcggtttaaggtgaaatttttgttcgtaatgcggattgataaaccagaattgtttgtgaaaaatccgatagtgggaagtgcagagaagtttctcgaatagttcgatacttgtccggcatttccgtatgtcgagaagttcatcgatgcgtgcctggctttcgccaaagtggtgtaataaactgctgtagatgcctgcgggcaataaatgaatgaaaggcaggcgtgaaacatatttgttccggcaaatctgctgatgccctccaaaaggcatttgccagggagggaagctgataaagagtagtccaccgggagtgaggaagcgtttgatatgttctaaaaggcggtatttttcggagatatgctctataacatcgtgaatcagtatgatgtcgaatgcttcttccaattgtatgatttgaaaaatatccgaggctatgaaagtggcgggcagtctttcttcctggaagaactggcgggcttgccggatgcggttttcggataaatcaatgcctgtaacccggcagccgatgcgggcaaagggtaccagattgccaccttcgccacaaccgatttcaagaatccggctttggggagtgacagaagtgaatcggtgaatgtagggaaggaaatgaagttcactggtcgttgccagttcctgaaagtaagtctttctgttttcgtgtctttgctgcatacgtttggttgtgttttagattcattttcaaagaaaatccttgaaagaaataaagatataaataataattgtatattgagtgaaaagtaactttttttttagttaatatttgcgatttctatatccggcttcatctgattaatggttgacgaatcttgttttggatacagagttagggtgtataaaaagcaaacggacaccggaactgataaagttccggtgtccgctgcattttctatctatacgtctttacttgcgatagctttccaactcttccgccttgaacttacggatgaagttgaaatgcttctctatttcagactcggcatagtttacgtacaccagcgccgacttggcaaacatttcgggagctgttgtcgcatcctgaatcagcaagtgagacattacgcacacggcagccatttcgtaaagacggcgagccacgaagtccagcaattcctgattgccgctttccttaacggcgttggtgcaggcttcgaacttattcgtcatttcttttacgcggtccaacagcggttgcatttcttcgctgcacggaatcagctcatagtcgcgcagggtggcggcataagaaccgttggtgacgtagcggatggcggctaccgtctgcaactgtgtggtaccttcgtagatgctggtgatacgtgcatcgcgataaatgcgctgacaggcatattccagcatgaagccggaaccgccgtgaatctggatactgtcgtaagcattctggttggcgtattcggagttcataccttttgccagcggtgtgaaggaatcggccagtttggcatatttcttctgttcctgacgttcttccggagtcagtttgcgttcgcgggcgatgtcgtccagtgccttgtagatgtctacgtagcgtgaagtctggtacagcagggcacggccggcatccagtttggctttcatgatagccagcatatcgtacacggcggggaactcgatgatggctttgccgaactgtttgcggtctttggcataagccagcccttcgttataggcagcctgtgacagacctacggactgagcggcgatacccagacgggcgccgttcatcagcgccattacgtatttaatcaaaccgagcttgcggtcaccgcaaagttcgcacttcgcattcttgtagaccagttcgcaagtgggcgaaccgtggatacccagcttgttttcgatgcggcgcacgtttacaccgccgtcacgcttgtcgtagatgaacatggacagaccgcggccgtcctttgttccctcttccgagcgtgccagcacgaggtgcaggtcggcatcgccgttcgtgatgaaacgcttcacgccgttcaggcgccagcagttgttggcttcatcgtaagtggctttcagcatcacgctctgcaggtcggaaccggcatcgggttcggtcaggtccatggacatggtttcaccggcgcagatgcggggaatgaaacggctgtgctggtcttcgttaccgaactcgtaaagagtctcgatacagtcttgcaaagaccagatgttgccaaagccagcatcggcggcagctacgatttccgcgcacatggtgtacggggtaatcgggaagttcagtccgccgaaacggcgcggcatggtcataccgttcagtccggcctttaccatggcgtcgaggttctgtttggtgccgctggcatattccacacggccgttggcgcaatgagggccttcttcgtccacaccttcggcattgggcgcgataatctcacccgtaatctcaccggtgatttcgagcaccttgtcgtaggagtcgattgcatccgcataatcctgcggtgcataatcgaacttgtctttatcttcgtagccgcgttctttcagttcgcagatacgctgcatcatcggattgttcaagtgatacttgagttccggaatatctgtataaaaattagccatattgtttttccctttaggagttagcggagttaactccttatttactattctgtttgtaatacttaatcatcttcggaataacctcttctaccgtaccgttgataacgtagtcggcaatggcattgataggagcgttctcgtcattgttcacggagatgatgatgccgctctcctgcattccggcaatgtgctggatttgtcctgagatgccgcaggcgatatagagtttcggacggacggttacacccgtctgacctatctgacggtcgtggtcggcatagcccgcatcgacggcggcgcggctggcgcctacttcggcgtgaagctccttggcaaggtcgaacagcatgtcgaagttctcgcggctgcccatgccgtaaccgccggcaatgacgatgggagccccctttaaattgtgtttcgccttttccacgtggcggtcgataaccttcactacatagtccgtttcgggaacgtacttggcaacgtcgtggcggattacttcacccttgtagtcggcatccagaatctctttcttcatcacgccctcgcgcacggtcgccatttgcggacggtgttcggggttcacaatcgttgccacgatgttgccgccgaatgcgggacggatttggtacaacagattttcgtaggtcttgccctctttcttatcctcatggttgccgatttcgagtgaggtacagtcggcggtcagtccgctggtcagtgcggaagatacgcgcgggccgaggtcgcggccgataacggttgcacccatcaggcagatttgcggctgttcttccttgaacaggttgatgaggacggaagagtggggaagggaagtgtatgggaacaggcccggagcgtcgaatacgtgcagtttgtcgacgccgaaaggcaatacctgcttttcaatgcctgccagattgctgccggcagcaactgcttccagttggcagcccaactgattagccaatttacgacctttggtcaggagttcgagactgacatcggctaccgtagtgccttctatctccaaatatacaaatacgttattcataatcttatcctatcgtgtggttagctaacagttcaacaatcaaatcttctacatcccggtcgctgcccgtgagcgttttgctttctttggcctggaatgaaatattctgaatggttttcaccttggtgggcgagccgctcagaccgcattgtgcgaggtcgccgttgacgtcggccacactccattccgtgatgttcagataagggtatttctcgtaaagggctgcatacggcagttcggcgccttctttttcaatggcggctttctcctgcgcaccgagggcgcgtttgtatttctgcaccagtttggcattgcgcggacggcagggagcggcgcttccgttaacggtgataacgatgggcaacggaccttccacagtctccacaccgccgtcgatatggcgttttacggtaatctttccggctgctttgtccacattcagaatctcttccgcataagtaacctgcgtcaatcccaacttctcagccacttgcgggcctacctgtgccgtatcgccgtcgatggcctggcggccgccgatgatgatgtcataatcgcctatcttcctgatggcggtggcaagggcgtaggaagtggccagcgtatcggctccggcaaaagcgcggtcggtcagcagatagccgttgtcggcgccgcggtaaagtccttcacggataacttcggctgcgcgtcccggtcccatagtcaggatagttacggtggagcccggatgtgcatctttcagccggagagcttgctcaagggcattcaggtcttcggggttgaagatggcggggagtgccgcgcggttaatggttccgtcggctttcatggcatctttcccaacgttgcgtgtgtcgggaacttgttttgccagtacaacgattttcaaactcatgttattaattattagtattagtattccatatgtcagtaccgggaataggagtagtagagtcctgctactgaaattgtccggttaactatcagcttgcaaatttacgcaaagagttgggtttgacaagaaaacaaggtaaaaaatgcacatccggggagattttgagcaaaaacgcaaaccgtaaaaagggtaacgcaaaccgtaatccgtctaccttccgaatgttctctccgttgtatttttgcagcgtcggacatatcggtaaatcatttttatgctatccgtcgtttttaaataaaccatctatttataaataaagctatgtatatagaaaagattaacgggcctgccgacgtgaagcggctttcggcaggcgaactggaaacattgagtgaagaagtgcgcggcgtattgctgaagaagctgagtgagcacggcggtcatgtaggcccgaatctgggtatggtagaggctaccgttgccttgcactatgtgttcaattcgccggcagacaagattgtctacgacgtttcccaccaaagttatgcacacaaaatactc

SEQ ID NO: 581 - DNA, 7767 bp, unidentified
  source 1..7767: mol_type = unassigned DNA
tcagccatgatatgcctccttcatcttttctataaatttatcttcgccaactctctcgattgtgaatcggaaacgttcgcttggatttgcgttatcatcaaaaaactgaattgctgcgtctgttacacggaacaaatcttcctcagattcaatgaccggcaaaatttcctcacctttgtgaatccggttaccaaacagtccgccaaatgatacaagataaccgctttttgcatcccatgcatccgtcgggcaggccttcacgcagcgtccacagtaattacatttactctcatccactttaattttattatcctcaagagtaatcgcaccggtgcggcatgccttaacacagacaccacaggaaatacaggcatcttctttccactgcacctttgttgcacctttgataccaacatcattttcctctgcctttaagcaattgttctgacagccggtcacaccaaatttaaacttatgtggaagttctctggcgaaatatctctcatccagtttttttgcaatatcatatgtgtcaatgttgccgcttggacaaatctgatttccctgacaggaagtaatcgtacgcacacgtggtccgcacacacccggcttacagccaccttttgccaaatcttcttttacggcatcaatatcatctaatttgataaatggaatttccacgctctgacgggaggtcaagtgaacatgtccatctccatatttgtctgctacttccgcaattgtcttcaaattctctgcggttaagtttcctcctacgactgccaatcgaagagaaaaacaatttttttgtttctggcgcataaatccgccctttttcagtgtactgtagtctactgccattttcttatcctcctgctctttctacttgagtgcgtgcttaaaatcttcgattaaatcttccacatcttcaattccaacactaatgcgaatcaaatcatcaaaaacgcccgcttcttctttttctttttgtgtactgtgtgcattcagcgtcgattccggatgaatgattaaagtttttgtatcgccaatattcgacacaattttcggtattgtcaatgtgttaatcaaatcaaacgcacgctctttggagccaactcgaattgtaagaattgctccatatccattttgcagaactttctctgcctgtgcatgccataaactgtcactaagtcccggataatttactgttacatccggatacgtgtttaaaaattcagccagtcttttcgcattatcgcaggcccgctccatacgcagacccagagtttccatacctaagagattataaaacgctgtctgtggagacaaacaggctcccgtattacggaacagaccgtttcgcagttttgccgtgaaagcaaatttgccaaacttcgcatactctgccatgcccggatatttctccttgtcccagcgaaaagcaccgctgtcggtaatcacaccactgatggcgtcactgttggcattgatgtatttcgaggtcgaattgactacaatgtccgctcctttttcaatcgggcgtactaaatatgccgttgctaccgtgttatccatcacaagtggcagattatgtttgtgtgctgtctctgctaacttctcaatatccacaacgtcaagttttggattaccaatcgtctctgcgaaaatcacgcgggtcttttcattgatggcggcttccaccgcctgctcatcgtgaatatccacaaatactgttttaatgccaaatgcctcaaaatcatgaaacacatcgatggatccgccgtacaaacttgtactcgctaaaatttcctcgcccgcacggacaacatttaacagcgcattcgtaatcgctgccataccggatgcacaggcaaccgatgcaattccaccttccaatgctgtcatttcattttcaaaagccaaaatcgtcggattattaattctcgtataagaaaatccgtttgctttattatgaaacaacttttcatgctgttctgccgaagactggtaaaaagcactggaatgataaatcggagtcagtgtagcaccggtctccttatcccctttttctacctgatgcagtagtgctgtattaaatctcatggcgtcctcctctaaatgtaatcaccgcgttttgcttcattacccaaaaagacggactgctcacggatataatccgctgcccacttcgcatctgcgccctcgtcaagccagttacttaagtacgattcactcttattctgaatggtatctgcctgctttttatcaactaacaataatacaacaataccggcacgatgtaaatgtttaatcacacagtcaatatcatcattttttccaggggcatacaaatatgtatgtctgccatccagattcagaattttctcgacgtcttccacaaacgcacggtttatcttcttgtcatcttttacaaactcaactgtaattgctttctgtccattggttgctgcacgaacagttcggtccacacgtccttcgtagacactgtgctctttctcatgcacttcttccacgacaccgcaagcagaagtcatattcgtcacacggtcaatcaaaatgaattcacccatcgttttatgattcttaaattcatcgatgacaatgcggtctgccagtgaaattttgcaacttgcaatctcatttttagcaagattttttacatcctttttctcaccggtattaacatctaccgcataagaaatttctgtcacagaacaaggaattgttttcgttccgagtttaaagaagaagtttttgccacggaacaattcgtcatcgtccatccacaaaatcgtagcagtcagagtcgatgccgttttcacaccggaatctaccgtaagtacacagccgcgggaaacatccacttccctatctaactgaatggtaaccggctggccttttttcgcctctttactatccttatcaccaacataaatactttttacttttgccttttcattgcttggcagcgttgtcagctcgtctcccacatggatatttccattttctacctgtccctggaaaccacggaaggtatggtccggacggcacacacgctgtaccggcatataaaatcctttttcatgagaatcctctgccacatccacatcttccaaataagaaagaagagtcggtccttcataccagtcaatcgcatcggatttctttgttacattatctccttccgttgcggaaaccggaataatctgaattgtctgaagattcagttcaccggcaagttcttgaatctgtttttcaatttcatcaaagcgctctttgctgtaatcaaccaaatccattttattaacagcaaatacaaacgaattgattcccatcaacgcacaaattctcgcatgacgtcttgtctgaatcaaaacaccctgtgtggcatcaatcaaaataactgccaaatccgcaaaggaagcacctactgccatgtttcttgtatactcttcatgacccggcgtatctgctacaataaaacttctcttatctgtcgtaaaatagcggtatgccacgtcaatcgtaattccctgctctctctctgccatcaatccgtcaagcaagagcgaataatcaatcgcaccgccgcggcttccgactttactgtcaagttccagtgccttttcctgatcggcataaagaagttttgaatcatacaggatatgaccgatcaaggttgattttccgtcgtccacgcttccgcatgtaataaattttaataatccactcatcttagaaatacccctctctctttcttctttccatacttcctgctgcctcattatcaattactcgtgtcgttctctctgacgatacggcactaagtgtctcatcaataatttcatccaatgtagtcgccgtcgactcgcatcctccggtcagaggatagcatcccaatgtacggaaacgtacactcttatgctcaattttttcacccggacgtaatttcatgcggtcatcatccaccataataatgttgccatcgcggtaaacaaccgggcggacttttgcaaaatacaaagaaggaatctcaattttttcccgtcttatgtactgccagatatccgtctctgtccagttggaaagtgggaacactctcacttcctgatgtttctgaatctgggaattatataatttccacatctccggacgctggtttttcggatcccaggcatgatgctcatttctaaaagaaaagattctctctttcgcacgggacttttcttcatctcttcgtccgccgccaaatgctgcggtaaaaccatatttatcaagcgcctgtttcaatgcctgtgtcttcatgatatcggtgtaagcagaaccatgatcaaatggattaatgccctgctttactccttcctcattgatatattcaatcatttcaatgccaagttctttcgctcttctgtcacggaactcaatcatttctttaaatttccatgtcgtgtttacgtgcaaaaacggaaatggcggtttctccggataaaaagctttcattgccaggtgtaacataaccgaactgtcttttccaatcgaatacagcataaccggtttttcacattccgccgcaacttcgcgaatgatataaattgcctctgcctccagttcatccagatgtgataattcactcatatcgttttccttcctttcttctctcctcgttaatatttgttggactctttcgtatttagaacaatctgctcggtttcgccatcctgtctgtgtatctgccagtacagcttgtctccttttttgtcgactgtcattttgcttcccataccgccgatatcggctcctaagtagagggaaatcgcaccgaagtgacattctttcacacaagaggaacatccccagcagtccttcgggtacttgatataggctttccctgcctcattcattttaataaggcttcccggacatacctgctcgcaggctttacagcctttacagagcgcctgattcatcgtgatgctcataatgctcctcccttccaactaatttgcgggtaaatacggtgattttgccatcttccattttggaattaacatactttaaccagtcaccgctctttttaggataatctaaattttcatcaaaactgtgccatcttgtctcttttcttgcaaaaagatgagcaattaccgatttgcacacggtaagacgttctttcaattcatacacaaacatcaactcatgcatatcaccggcatttacattttcggcaagtttttctatcttttcaatcttttctttcgcgagcgcaagctgtttttcattgaattgataatgcgtggaaatacctccggcatactcatccattaccttctgcattgcctcttccagcgcttccgtctcatacataccgccttcatttgataaatagcggttgtactccgtaatctttgcatcgagagcttttttctctgcactctcatcagatgccttctctttatctctttcctcattcaattgagaaactattttcttggctgcgatttcaccttcaaccatcgcaccggtcacatatttttgcggacatccgcctgccacatctcctgcggcaaacaaaccatgaatcgtagtctctctgtcggtatcaacccagtagccgctcgctgtatggccaccgacgatataaggctcagtgccctcgatttcgacattctgctcactcggatttttacccgattcaagccatttgagtgtctggctcggtgccatgtttaagtacgcttttttcagcgactcatcctgctcttgggtaatgccctccgttctcagataacacggtccgcgcccctctaagttttccatcaccgtgccgtagacacgctccgatgtagtcagaccgtatttatcttcgtacacctctcctttggcattcacctgcttcgcaccaacaccctgagcaatcgttccggtcggtgcaattgtatctttacagcgaagtgcgataaaacgcatttcaaatgttgtcatttctgctccggcacgaattcccattgcataaccggctccggtattaaacggcggataccacattttgtggcgggaaaatcccggattattcggccggtacaaacctgccgcaccgccggtcgcacaaagcaccttctttgcccttatctcataggcggtaccttcttcaatcgaaaagccgaaagctcctttgatttcattctcctccacaatgtaatcggtaatgttaatccggtttaaaattgtgacatcctctaactcttctaccgcctttgccaaaagcggcttcatattttctccatttatttttatgttgcggtttcctctggcaacatagtttccattttcatcttttaaaataacaagtcctaagttctccattttatgtgtcacacggtttagcccttcggacatcgtcatcagcaaatcttctcttacaatgccgtccgcatctttttttgcgtactccacataatcttccggttttcttccatccacaatgtaagcattaatggcattgacaccggccgccagacagccgcttcgtttgatatttgctttttccgcaatgacaatcgaataatcggactgttcacgaatcgtaagtgccgcatagcaccctgccgttccgccgccaataataagaatgtccgtatgcaatatctttttgttctcaatctgcatggtgtatcctccccgttaaatgtaaaatacatcttctctttcctgcatctctttattttccatcaaataagtctgcttcgaatcaaagatatataatcggtaaatcaatacatgaaccgtctcgccaaccgaaacaaaatctttttccaaagaacgttctccaacaaccaaaataccattgatgtccacggtaacatccattcggtttcctcggaacacgacatctgttaccacaccggtttcagcggcactgatatagcggtccagttttccgctctttgagattttcacaaattccggacgaatgaccgcctgattggcatgttcaatccgctcgaaacctttcaatttatcataatcctcaacaaccgaagacctgccgataaatcttgctacaaacggtgttgccggacttttataaatttcaaccggcgttcccatctgctcaatcgttccatgattggtaataataatttcgtctgcaacctcgaccgcttcctcctggtcatgggtgacaaaaatacttgtaataccaagttttacgaccatctctttcaaccatgagcgaagttcggcacgcactttcgcatcaatcgcagcaaacggctcatcgagtaagagaactcttggatttggtgctaacgctctagcaaaagcaactctttgtctctgcccgccggacaactgattcggatatcgtttttccatccctgacaaaccggtcatcgccaacaattccgtaacccgttccttaatctgctttttcggcatcttctgaagcaccagtccaaatgccacattatcgtataccgtcatataacggaacagcgcataattctgaaagacaaaaccaatcccacgcttggcagccggtacatcattcacccgcttgccatcaatgtaaatatctccttcattcggattctcaagtcctgcaatcatccgcagtaaagttgtctttccgctgccggacggtcctaacagggcaactaactttcctttttccacaccaagacttacatggtcagaagcaagaaaatcaccatatttttttacaatgtttttcatttctacatacat

SEQ ID NO: 582 - DNA, 19058 bp, unidentified
  source 1..19058: mol_type = unassigned DNA
  misc_difference 1670: note = a, c, g, or t
  misc_difference 1671: note = a, c, g, or t
  misc_difference 1672: note = a, c, g, or t
  misc_difference 1673: note = a, c, g, or t
  misc_difference 1674: note = a, c, g, or t
  misc_difference 1675: note = a, c, g, or t
  misc_difference 1676: note = a, c, g, or t
  misc_difference 1677: note = a, c, g, or t
  misc_difference 1678: note = a, c, g, or t
  misc_difference 1679: note = a, c, g, or t
  misc_difference 1680: note = a, c, g, or t
  misc_difference 1681: note = a, c, g, or t
  misc_difference 1682: note = a, c, g, or t
  misc_difference 1683: note = a, c, g, or t
  misc_difference 1684: note = a, c, g, or t
  misc_difference 1685: note = a, c, g, or t
  misc_difference 1686: note = a, c, g, or t
  misc_difference 1687: note = a, c, g, or t
  misc_difference 1688: note = a, c, g, or t
  misc_difference 1689: note = a, c, g, or t
  misc_difference 1690: note = a, c, g, or t
  misc_difference 1691: note = a, c, g, or t
  misc_difference 1692: note = a, c, g, or t
  misc_difference 1693: note = a, c, g, or t
  misc_difference 1694: note = a, c, g, or t
  misc_difference 1695: note = a, c, g, or t
  misc_difference 1696: note = a, c, g, or t
  misc_difference 1697: note = a, c, g, or t
  misc_difference 1698: note = a, c, g, or t
  misc_difference 1699: note = a, c, g, or t
  misc_difference 1700: note = a, c, g, or t
  misc_difference 1701: note = a, c, g, or t
  misc_difference 1702: note = a, c, g, or t
  misc_difference 1703: note = a, c, g, or t
  misc_difference 1704: note = a, c, g, or t
  misc_difference 1705: note = a, c, g, or t
  misc_difference 1706: note = a, c, g, or t
  misc_difference 1707: note = a, c, g, or t
  misc_difference 1708: note = a, c, g, or t
  misc_difference 1709: note = a, c, g, or t
  misc_difference 1710: note = a, c, g, or t
  misc_difference 1711: note = a, c, g, or t
  misc_difference 1712: note = a, c, g, or t
  misc_difference 1713: note = a, c, g, or t
  misc_difference 1714: note = a, c, g, or t
  misc_difference 1715: note = a, c, g, or t
  misc_difference 1716: note = a, c, g, or t
  misc_difference 1717: note = a, c, g, or t
  misc_difference 1718: note = a, c, g, or t
  misc_difference 1719: note = a, c, g, or t
  misc_difference 1720: note = a, c, g, or t
  misc_difference 1721: note = a, c, g, or t
  misc_difference 1722: note = a, c, g, or t
  misc_difference 1723: note = a, c, g, or t
  misc_difference 1724: note = a, c, g, or t
  misc_difference 1725: note = a, c, g, or t
  misc_difference 1726: note = a, c, g, or t
  misc_difference 1727: note = a, c, g, or t
  misc_difference 1728: note = a, c, g, or t
  misc_difference 1729: note = a, c, g, or t
  misc_difference 1730: note = a, c, g, or t
  misc_difference 1731: note = a, c, g, or t
  misc_difference 1732: note = a, c, g, or t
  misc_difference 1733: note = a, c, g, or t
  misc_difference 1734: note = a, c, g, or t
  misc_difference 1735: note = a, c, g, or t
  misc_difference 1736: note = a, c, g, or t
  misc_difference 1737: note = a, c, g, or t
  misc_difference 1738: note = a, c, g, or t
  misc_difference 1739: note = a, c, g, or t
  misc_difference 1740: note = a, c, g, or t
  misc_difference 1741: note = a, c, g, or t
  misc_difference 1742: note = a, c, g, or t
  misc_difference 1743: note = a, c, g, or t
  misc_difference 1744: note = a, c, g, or t
  misc_difference 1745: note = a, c, g, or t
  misc_difference 1746: note = a, c, g, or t
  misc_difference 1747: note = a, c, g, or t
  misc_difference 1748: note = a, c, g, or t
  misc_difference 1749: note = a, c, g, or t
  misc_difference 1750: note = a, c, g, or t
  misc_difference 1751: note = a, c, g, or t
  misc_difference 1752: note = a, c, g, or t
  misc_difference 1753: note = a, c, g, or t
  misc_difference 1754: note = a, c, g, or t
  misc_difference 1755: note = a, c, g, or t
  misc_difference 1756: note = a, c, g, or t
  misc_difference 1757: note = a, c, g, or t
  misc_difference 1758: note = a, c, g, or t
  misc_difference 1759: note = a, c, g, or t
  misc_difference 1760: note = a, c, g, or t
  misc_difference 1761: note = a, c, g, or t
  misc_difference 1762: note = a, c, g, or t
  misc_difference 1763: note = a, c, g, or t
  misc_difference 1764: note = a, c, g, or t
  misc_difference 1765: note = a, c, g, or t
  misc_difference 1766: note = a, c, g, or t
  misc_difference 1767: note = a, c, g, or t
  misc_difference 1768: note = a, c, g, or t
  misc_difference 1769: note = a, c, g, or t
gtgctcaaatccatattcgaggagcagatcctgcatcatgcggcggcgctggacgccgtatccgattcggcttacggcgatgcggaggtttatttgcagcgctatctgggcgaggattacaaggccggatttctccggttggtacaggaggctcggtcgaagacggatcttccggtaatcgccagcatcaattgcgtggccgataaaggcgattggatcgaatacgctacagcgatggccgatgccggagcttccgcgctggagcttaatattttcatccaacctacggacattcacgcccaggcccgcgaactggagttgaactatgcggagatcgtcggccgggtggccggtgcggtgaagattcccgtttcggtgaagctgcccatgcgcctgaccaatgtcttcgccttgtcgagcgctttgctcggttacggggcccggggtgtggtcttcttcaaccgcttcttcgagccggacgtggatgtcgagcggatgactttcgtggagagttcgccttacagcgagccgacggaattgcgcaacgtcctgcgtatggtggcgatctgctcggccgtgttgccgcagttggacctttctgtttcgacgggcgtgcacgatggcgaggctgcggtcaaagcgcttttgtgcggagccgaggcagtgcaggtctgcacggcgatccaccagaagggattcgaagtcattgccgaaatgaacgagtacatcgaccgttgggccgagcggcagggtttcggttcgctcgatgagttccgggggcgtctgaatttcaagaacgacacttcggccatgttccagcgcgtacagtatatgaagtatttcccgtcggaggcgaaatagtatttgccgaagtagtttcggttttcgataacgagcgagccgtacagttcactgtacggctcgcttttgtattggtgttttccgcttaatattcgatcttgtcgagaatcccttgcaggtaagcgatcgccacgccgtagttggtcatcgggacgcgctgggcgcgggcttgggcgacgcggctcaatacgtggcgccggttgaacatacaggcgccgcagtggatcaccaggtcgtagggcgtgaggtcggcgggaaagtccgtgccggcaaccacattgacccgcagtgcgggtccgatccgtttgcggagcatggccggaattttgacccggccgatgtcttcgcccaccggagcgtgcgtacaggcttcggcgatcagcacgcgggagtcttcacggagctgtccgatggctgccgcgctctccacgaagtagtcgatgtcgcccttgtaacgggcgaagagcaccgagaacgaagtcagcaagcttgcggcgggcttctgcgcatagacagtcgagaaaacctgcgagtcggtgataatcagtttcggcggtgcggccagcgacgagagcgtgccttcgatctggtcggtggtacagcagaccacgcggcacttcttatcgagcagctcgcggatcgtctggacttgcgggaggatgaggcgtcccttgggggcctggatgtcctgcggcatgacgagcatcaccacgtcgcctgccgaggcgaggctgcccgtgatttcgggctggttgtagtcttcgggcaggttgcggatcagggcttcgcgcagggcgtcgagtcccgtnnnnnnnnnnnnnnnnnnnnnnnnnnnnnnnnnnnnnnnnnnnnnnnnnnnnnnnnnnnnnnnnnnnnnnnnnnnnnnnnnnnnnnnnnnnnnnnnnnnntgtagtcttcgggcaggttgcggatcagggcttcgcgcagggcgtcgagtcccgtgctgttcgaggcgctgacccggagcggccgttgcccgaagagtgcttcggcctccgcatcgggcataccggcaaccaagtcggccttgctgcgtaccactaccgtcggaatatgcctttcttccaagagtcggaaccattctatttcgtcgttctgcggcacggcttcggagaggagaaggacggccaggtcggtcttctccagcatcttgcggctttgctgcacacgcagtatgccgaggtcgccttcatcgtcgaaacccggcgtgtcgatcagtacgcaaggtcccagcccgtgtatctccatcgtcttgagtacggggtcggtcgtcgtgcccggcgtcgcggaaacgacagcgctctgttggcccgtgagggcgttgatcagcgacgacttgccgctgttgcaccgcccgtagaaagcgatatgcagccgttcggcgcggggagtctgctcgttcatcgtgcgaaacttttagaagcggaaatcccgtttaccttcggcgatcgctgcgaggttcttctctgtgatgcggcgcacacgctcgttgaggagcatcggaacctctttcgcaatcatcttttcacccagggttcgggtttcgggcgatgcgtagtcttcgagatactccttgagggtcatcagggcgttgggcgtacagcagttggcgatctttccggtcttggccagcgacatgaagcggtcgcccgtgcggccttcgcggtagcaggccgtgcagaagctcggcacgtagcccagttccagcagccaacgcaccacttcgtccagcgtgcggtgatcgctcacgtcgaattgtgcggaatcctgttcggcatgcgtcgtgccggcgtaaccgccgacgctggtgcgcgagccgccgctgatctgcgaaatgccgatttccaacacctgctcgcgcgagcgctgcgattcgcgggtcgagataatcatgcccgtataagggacggcgatgcggatcacggcgacgatcttgcggaatatttcgtccgaaatggcatccgggaagtccttggtgtcgatgtcgtcggccgggcagatgcggggtacgctgatggtgtggggaccgacgccgaagcgggcttcgaggtgctcggcgtgcatgagcagtcccgtgaagtcgtaccggtaggtattcagaccgaacagtacgccgatgcccacgtcgtcgataccaccttccatcgcgcggtccatcgcttcggtgtggtaggcgtagtcgctcttcgggccggtggggtggagtgcttcgtaagcggttttgttgtaggtttcctggaagagaatgtaggtgccgatgcctgcatcgcgcagtttgcggtagttctcgaccgtcgtagccgcgatatttacgttcacgcggcggatcgccccgttcttgtgatgtacggagtagatcgtcttgatcgattcgagaatgtactcgatcggattgttgcgcgggtcctctccggcttcgagtgccagacgcttgtgacccatatcctgcagggcaatcacctcgcggcggatttcgtcctgggtgagtttgcggcgcggaatggttttgtttttctggtgatacgggcaatatacgcagccgttgatgcagtagttcgacagatagagcggcgcgaacattacgatacggttgccgtagattttctccttgatctgtttggccagcgtgaacatgcgttggttcaggtcttcgagttcgcactcgagcagcacggccgcttcgcggtgcgtgacccctttgccttcggccgctttttgcaggatcgcctcgatcagggggcggttcgcacgattttcgcgggcgtaagccagcgtttcgacgatttctccgtcatggatgaactcctccgccttggaggatgcgacttggtacatatctttgtgtttttataagctattcttgataatctccccggctccacgagatgtggcggccgatttcgttgagctcccgttccagagcggccaatccttcggcagcttcggcaccgaaggcggccttgccgtcgtagaggttgtatttcgaccgttcgtccggcggcgaaaggttgggcatcaccacgttggcaccggccaaaataccccgcatccggccgttgcccgagagggtggcgagcgcggtggtcgaagggatcagtgctgcgggacgcatcagccgcagaatcgacagcagggtgagcgttcgttcgacgcttccggccggttcgtggccgaaaggggtgtcgcggtgcgggatgaaaggtccgataccgatcatctggggttcgaactcccggatgaaaagcagatcccggaccagatcgtccaccgtttgtcccgggctgccgaccatgatgcccgtaccggtctggtagccgatctttttgagggtgtgcaggcattcgatgcggtgatcgagggacatccggacgggatggagccaacgatagtgatcgggagtgatcgtttcatgccgcagcaggtaacggttcgcgcccgcttcgaacaacgcccggtaggaggcttctgtccgttcccccagcgagagggtgatggcgcagtcgggccagcggcgacgcatctcccggatcaatccggtcagcagttcgtcgttcagagccgggtcttctccgctctgaagtacgaatgtccggaatcccagccggtagccctcttcgcagcaggccagtacggtttccggggtcagacggtagcgttctgccagacgattgctgcgtcgaatgccgcagtagcggcagtcgttgcggcagtaattgctgatttcgatcagcccccgaacgaaaactccgtttccgaaatgcacacgggcgacctcgcgggccgccctgtgcaggtattctctctcttcgggggacgcatcggtcagcagaaggcgcaactcttccggggaaagggtgcggttgcgtttcaactgatcgacgagctctttcatagccccgtcggatttagcgtttagccagttccttcgcgaattgccgtttaccggcatcgtgcaggttgtgggtgctgggacccgtgatacatccgccttcgcaggccatgacctcgatgaacttggccggggctttgcccgatttggcataggcgcggagcagggatacgtttttcttgttcaggttggagacctggatgccttcgacctgcggccggttgttgtccgccaggaagagctgtacggcgcccatcacgcctccggcctgtgcgaagccgtgggcggcccgggtcgaaacgaacggaatggggaacggatcggtggttgcgacttcgatacccaggccgtcgaaaatggagttgatctcctcgaaggtcatcacgaaatcgacgcattcgtcgcggcgtgcctccttgcgtttggctacgcacgggccgatgaagaccacttgcgcgtcggggtgtttctccttggcgatccgcgcggcgtaatacatcggcgatccggtgctcgaaatgaagggcttcatctcggggatatgcttgttggccagttcgacccacgaaggacagcaggaggtggtcatgaacgcctgtccctcctcaattttctcttcgagttccgcaccttcattgcggatggtttccatggcgccctgcgctacttcgatcacgtcctcgaaaccgatggccttaatcgcgccatatactttttccgtgggggcgttgtattgtccgagaatggccggagcgacgacggcgaccatcttttctccttcgcgcagacgctgcagcacgtcgaacacctgcgaaatttcgaagatcgctccgaacggacaactgttgatgcacttgccgcagtagatgcatttgctctcatcgatatgctccacgccgcgttcgtccttggtaatcgcctttacggggcaggcctcttcgcacggtacgggcatatagacgatggcatggtaggggcagttgctgtggcagatgccgcaactgatgcagagatcgtggttgatgaccgctttgccggcacgattgaattcgatggcgtttttcgggcagttggtggcacaggcccgggccacgcaacctttgcagaggttggtgatctcgtagttggtctgcacgcacgacgagcaggcttcgtcgattacgcagagaatattgtctttctgctgctgccctttgcgctccagggctttgcgggcatattcggacagcggggtgagttcgtcggtttcgtcggacatgtcgaaacccatcagcgggaaagatttgtatttccacacggcgcgctccttgtgtacgcagcagcgacccaaaacccgtgaggtacggggactcaattcgatcggcaagcggtcgattcgctcgacgagctggttgtctttccacaatttgatgagattggtcagcaacttgtgtctgacaatcattacgttattggtaagaggcatgtcggaataatagaatgttaaacgaaatttccgtcgcaaagataggttattacccgtatgttcacaaacaaataagtataaaaaagagagtaaatattattttcggataattttgattttcaaattttatataatatattgcaatacacatgaacggcatttatgttttgaccatctaatcctaaatattatgcttatgaaaaaattattactatttttaattggtggtatcttgttaatcggcacttatggttgtgctaattatgaagaagatttgttggacgaaatttcgccgaaacaaatgttagctactgttacgaccgaaattgagttggcggatgcggtgtatcatagagacacagtcttggatccggccgcagaatgatccgtacaggcttgagaactttcagcaggcgtacgacaatatagtatcgggtgaatcgaaaattgtcagggcatctgatgagtttgcagcaagcgcgcggagtgtgcgaaaagaattctcagcaactgccaaaacgcagttgaaactgaaagctacccactatgccttgaaaatttttccaaaaacggaagaggaacaacgaagccttgaactggacgagcagatcaagatcgcgtatacgcctttcaattatacgtcattacctgatgaggtgacccagagtcttgtgttttcgaaatcccggacacagttttgcgaggaagatgaggagaggcgttattctgtgacttacgagggcggtatgattaaggatggaccagtggagcctgtgacaattatattgcctgtattatatgccgtttggcctgtcgaaaaaccgttccctgttgaaatggattttgaaatcctttatgaagttttcctccctaaatatattactcttggtgagaatggattgagtgcggaggcaatacaaattttggagcaagaagccattgctttggctttagatgaagagagacatttaccaggtggattcccgcgcggaaaagtactatgttacgatactcatttaaagcgttatgtaccgctggagaatctaaaaatccgttttacgctgggttcgaatattgaggaggtttatacagacaaaactggatattatgctatcaacaataaattgatcgacaaccaggcaacggtaagttttgtttttcagcacgaaaaatggacgattgtcaagggttctgaggaaggaggacggatagaggaaataaagggaatttatggagaattaagaagtggtaaagatttgaactttaatattaactcttcttcggctccggatccccgctacgaaattcatcgtgcagtcaatttttatcattatggcgaacacgattttataatttctacttttgttaataacagaatatcaatagttgcattagccgttgatcctggtgggtggcaaggccgatttaattattggccgacttctgtggggagaatgccttttatacaagttggcaattgtaacaggaataatcatccgagactaataggaaccactttgcatgaattgggacattattgtcaatttcatttgcgtggcggcacattcagtgcgtacgatggtacttggaatatattgctcgaaagttatgcttcttatgccggatggcatatgggagaagcatattatttaaatcagggttggaaaaaaacatctctaaactcggatataacaggtcaagcaaggcaagaatgggattatcaaaatacaaccaataattattatactcctttgtttgtcgatttggtggatgattacaaccagggtgttggctatccttctcgctgctacgatcaaattaagatgcctcaattcgtggtgaatttgtttggagcctatagaacctggaatgattttgaaagtgcacttcgtaagtatacagggtcatattttacagaaaatcaaataaatgaatttcttttttacgagcgtagctggcttcaacgtaacggttatatataaaaatgggtttatgaggaaattcttattttttgcgttgtcggcgatatttaccgcagggactccggcaggttgcaataccgattacaatgcaatcagttattttgtgtgggtcaacgacagcgatcataagatcactcttttcgtagaatccgatttagggtgtgagttcaaaaatgaagtgatactgcctggagaaagttttactgcgatggataatggtatgggtgtttgccccgttccttcaagttacatttggaaaatgacgattattttcgacgatgggaggcttggattcacttatggtgtccgttattaccaggacgacggtcggtcgtaccctccgaattacgacgcacattacgacccttcgatcgatgataattatgtattcgaggatttgaggggtaacggtcgtcaacctaaagagcgttggacttatgtcttcaccaatgccgattacgatgcggcggaggcgatggtcccgttcgagtaaatagtttgtggctctgaaaaacgaacgcctcccgaatctgaaattcgggaggcgttcgttcgatggcggcctgtcttttggctctaacgatccagctcttggaagaagctctggaaatcggccatgaaaacgtccttgccccgcagtacttcccgcttggcgagcagctccgaaaggcggatgtagccgatcacgtaattgccgtcctcgccccgatattgctcggtgatgcggtcgaagtggaggattttcagtacgtcggtttccgtgtatcgcacataaactttcagctccacgtcggtcgtgtactccggacggtcgaggtagtgctgtttcttgtattcgtaccggtagtcgtgctgacgggccatgatgtcgctcaggatcgacgaggcggtaggcaggctgccggcgcccttgccgaacatgaactggcggtcgtagcattcgccccggatcaccacgccgttgtattcgtcatcgacgctgtagatgtatttgccgggggtgacgaattcgggcatgacgaacatcgtgaacttccggtcgctgaccttgaccacttgggcgaccagtttgatcttgacccctttttcgcgggcgtaccggatgtccgagtcgtggatagtcgagatgccgtaggtgaagatccggtcgggatggacatacactccgagcgcgtgaacggtaatgatgactaatttgaagagcgagtcgtagccttcgatgtcgaacgaaggatcgctctcggcgaatcccaatgcctgggcctgggccagcgccgcgtcgtaggactcctggtggtcgaacacccgcgaaaggatgtagttggacgaaccgttcaggatgcctttgacttcgagcagcaggtcgttgtcgtagtactcctcgaggttgcggatcacggggatcgagccgcacgacgaggcgtcgtacagcagtgccacattgtgtttcttttgcaggtcgatcagctccggcaggtggcgggcgagcatggccttgttgcccgaaacgacggggatgcctttctggagggccgccttgacgattttgtaggaggccgccgcatcgtcgatcacctccacgatcaggtcgatctccggattggagaggatcacttccggatcggtcgtgaaataggacgcgtcgatgctgcggggtttgttcgaccgcacgcagatcttgacgatttccgcatgggcgttgcgggatttgctgagtacctggaagatgccttgtccgactacgccgaagccgaaaaggccgattttgatcttattcatgggttggatggatgaaagggttgaggattcggttcagttgttcgtgctcgaccagaaacccgtcgtgtccgaacggggagtcgatctgatggtaggtgctgcgcggcagcatccggtgcagcgcctgcatttcgggcacggtgaagatgatatcggtcgaaatgccgacgaccagacattcggccgtgattcgttgcagcgccgctgccacgcctccgcgctggtagccgacgtcgtgcgtgtcgaaagcgttgaggatcttgtaataggagtaggcattataacgccggcagagcttttctccttggtactgctggtaggtgcaggcccggcgagaggagaagtcgtcgttctcgtcccgctgcgagaggtcgtagccttcgggtccccggtaggtgagcagcccgatagcccgggccgctgcgagtcccttcatgccggcagtggcgtaaggttccccgaaggtcgaatcggcttcgatggccatgcgctgcgtttcgtcgatggcgatgctccagggcgacgctttggcggccgtggcgatcaggaccagcttgccgatccgctcgggttcctggacggcccattcgaccgcctgaaagccgccgacggagctgccgaccaaggtgtggatgcggtggatgcccagaatgtcggccagcagccggtgggcccgtaccatgtcgcggatcgtcagttcggggaaatccttgtaataggggcgtccggtcgccggattgacgtgcagcggcccggtcgtgccgtagtgcgagccgaggatgttggcgcagatgatgaaatgctcggtggggtcgaggaatttgcccgcctcgaccgtgtgcggccaccacgaggccacgtccgaatcggcggtcagggcgtggcagacccagatgacattgtcgtgggccgcattcagtttcccgtaggtgctgaatgcgatcgtcagttcgggcagaatgcctccccgctccaattcgaaaggttggttatgacggtatatattcattgtgtttacagtcgttttaatgcgttgccgatctcttctttcaggtcgtcgatgtgttcgatgcccagcgagaagcgcagcatgttgggataaacgcccgaagcgaccagttcgcgttcgttgagctgggagtgcgtcgtcgaagcggggtgtaccaagaggctccgggtgtcgcccacgttggccaggtggctgatgatctccaggtggttgagcagcgaggaggcttgttcggccgatcctttgacgcggaaggtcagtacgccgccgaaaccgttggtcagatacttcttggccaaatcgtggaacgggctactcttcaaaccggggtagtttacgctctcgatcttggggtgcttctcgagccactgagccatttcgagtgcattgtccaccgatcgctgtacgcgcaacgagagggtttcgagtccttgcagcagcaggaaggagttgaacggactctggcaggcacccgtgtcgcggagcacttcgcaccgtgcccgtacggcgaaagcctggtcgccgcagttttcccagaagttgaatccgtgatacccttccgagggttcgctgatcaaggggtagcggccgttgccccaatcgaagttgccgccgtcgatagccacgccacccatgctgttgccgtgacctccgatccatttggtcgctgcgtgcagcacgacattggcgccccatttgatcggctggcaaaggtagccgccggctccgaacgtattgtcggcgattaccgcgatgccgtgtttgcggccgatttcggcgatcgcctcgaaatcggggatattgaaggccgggttgccgatcgtttcgatgtagatggcccgcgtacggtcgtcgatgagtgccgagatgctctttgggtcgtccccttgtgcgaaacggacctcgatgccgagtcggcggagcgtgtatttgaactggttggtcgttccgccgtagaggtaggaggtgcttacgatattatcgcctgcctgggcgatgttcgtgatggcgagcatttgggcggccatgcccgatgccgttgcaacggctccggtacctccttcgagggcggcgatgcgctcttcgaaaacggcggtcgtggggttgttcaggcgggtgtatatgtaccccggttccgtgagggcgaaaacggcggcgctcttttccgcactttcgaaggtgtaggccaccgtctggtggatggggacggcgcacgatccggtcgctggatcggcctgttggcctgcatgtacttgcagggtttcgaaacggagattctgttttttcatggttttgaaagttgatttatgttttcgggattgttacaaacaaaaaaatccggctgaaccagccggatttaagagatacacgtacgacgaatcttacacccggcatttacacctgcgcatcgacatcatcatacccatcatcgaaaccgaaagtccgacgatcagcgagtaagaattattggatgtaatgccgtttttcatgcgggtaaaatacgggtttgttatcgtattgatgtcgcaaatatagttatttttcgtgaaatggtgctgtcgagagaaaaatattttacaatgccattatttcgatgcaggatataaatatgattacgatctaaccggacaacttaagactgccgcatacatacaaagagcgcaaaacgacgaaaattggggcgagtcttccgcttttaacgaacgtgatattgaatatgacaaaaacggaaacattttacaaatgaaacgcacagatagtacaggaaatagattgcacgatcttgcttatatttatagaggtaatcaacttatatctttttcatgtaacgatcaagtgtacgaaggatatacctatgatgcctcaggaaatttgacttatgacccttatagtaatattcatattgagtacaatgaattgaatttaccgtctcgaatatttgacgataacaaagaagttcgctatatttacagtgccgatggtcaaaagttgaaaaccattgccgatggctcttttacatattaccgaagcacaatgatctatggcggctcaccaggttccggagaacaattgttatatattttgcatcctgaaggcatggctgtcaatgaaaatggaacttttgcatataaatataacttgaccgactatatgggtaatgtccgcacttatgcggtcgctgacagatcatcagaaactctgctggaagaacaggttctggattattatccgttcgggttggcacatagttataataacttgcataaaaaccgttatttattttccggcaaagaattgcaagatgcatccctcggccgccatggattcttggaattatacgatttcggtgcacgttactacaatcctatgtcaggacgttggtttaaccctgatccggcactgcaaacggttaatccttatcttttttgcgggaataccccaatggtatatattgatcaagacggagaattcttctttaccattctcaacgcaatcaaagacttttttcatggtttgtttacatggaattggtccagtgaaaattggcattccactgtcatggcattcaaaatcgacatgggctggttccaaggtaatttcggacaaattctttctagatttacatgggaattaccgcagacgttattcgggcatctgggcagtcaaacggaaaatttattcgaaggtgtaaaaagtgtaagctattacggtggagctactgcagtggaaacttactctgctaaatggggtggatttactctgggtagttttattatcggtcacagaggtcttcatgctgatcccaataattcactctttcaacatgagtacggacattatctgcaaagccgtgccagtggaccgctctatttgggaaaatacgcaatcccgagtttctatgatacgatgttcggacgaggaaaccataaataccattcggttgaacaagatgccaacgcacgtgccattaaatattttgaaaaaagaattcctgggtttgcggatcgaagaaataaaggaattaatgaaggatgggaccattacaagtatcctattgttgggtatgatgttcaaggcggtttttattctgctcgaagtcaagcggctcttgatcgggcacatattccggcttttgaaagtccactggatgcatttgtggccgtattatctttgaatcctgttacatcatttggaacgggagctatctatcaaactccatataacactcgaaaaaataataatgcatatataaatgaaaataaatgcagtattattacgagataatatttaaatgaatttactatgaaaaaatgggtcatatttcttattttatctattggattctgtattacaagtgtctcttgtataaaggaaagcagtacgttccattggtccgtgatggtaacgaacaaaacggagtctgcggtgtattgggcatttgcatggcccccaaattgggatctggaagttccttattatggatatattgaacctgattttaaaattctcccaaacgaaactaaaaaaatatcaattttatacggcgctaattctatcgaaggatcggtaggcaaaggcaagatgaaagtattttttctcgatgctgatatgttcgataaactttcgcaaggtccaattccggcagaggtcgtactgggaagtagaatttacactttggaagaaatacgggcaataaatttccacttttgcttccctttcgagtaaaatactttattggaaataaaagataacactgatggtaatttgattcattccatatttttgatttgaatagggtgtctaataatttagacatcctattttgttttttgttaattaaaacagtggtcattgtaaagctatatccttttaattctgctgggaagagtctaaacggctattccaatttcgaaatattgtcttaatgatgtttttctcttgctgtttcccgtcggaacgattttcactttgtcagtagcatcctctttcggttgccgtcggaaaagataggtgcccgtccgcgcctgcggcgctcgctctctccgcggcggaaaaatcatcctcgcgagggcttcggtatttttccgtcgcttcgttcgcacggtgcaccagtattctttccgaggcaaccgatccgttcgggatcgcccctcgaagaattatcgattatcgtatccgatgcaaatagactttgcatcgcatcaacacgtgagacacacggtaaaaactgtccaatcattatgacgaagacgaagaagtccgcttctcggaaatcctccctccctgccccggagacgaccactgctgcttccgcagcaccgctctcggaacaaagttcgacaacctccgctgccgcatccgaagccgtcgcgtccgcttcggagggcactcctgccgctacgccgatcgtccttctggagctgaatcggatcgtttgcagcacctataaccctcgccgcaatctgaatgagtcgtcgctggatgaactcgccctgagtatgcagcagacgggccagctgcaaccgatctgcgtacgcggcagcggcgagcactacgaaatcgtttacggggagcgccgctaccgggccgcgcagcgtgcgggcttcacacacatcaaggcccttgtctatgaacatctcacggacgaggatgcggaggacatggccatcacggagaacctccagcgtgaggacgtagcgcctctcgaagaggctgcggcgttccttcgtgcgctcaaaacgggccgtcacacagtcacaacgctcgtcgacaagttcggcaagagcgagcgttacatccgttcacacctgaagctcaacgaccttatcgagccgctcgcgaacctgctcgaacgcgaggagatcatcgaaagcatggccatcgagctggccaaatacccttcggaggttcagcagtgcgtcttcgaggagcatttcgcaaacgacggtcacaactcgtggaagaatacgtcgccccgtcaggtgggccaataccttcacgaccgctacatgaccaagctgaacacctataaattcgacaagacggagtgctcgacctgtgccgagaatacggccaacaacattctcttttcggatcttgccgaagggtgtgcgggctgcgaaaaccggtcctgcatgatccgcaagaacgacgaatttttagttgagaaagcgatccggatgcagcggaacgaccctcgcacgctgcttgccgtggaggtggggcgctattcggatgccgttctcgaacgcctcacatctcaaggttatacggtcgaggtcatcgacacctacagcatgtgggagccggacgttcccgtgcttcctgacgtcgaggttccccaagagtcggattacgaggaccgggatgagtatttagaggctctggcggagtacgaatccgaggtttcggagtaccgtgagaatatgaagaagctggatgcggagatcgacgcgggccgagtgcgtaaatatgcccttatcggtatgctggacgtcgatctgttctacgaggaggttccggagcagatcgaggagacgtccgacgacgagggcgtcacggtctatacgtcgatcgctccgcgtcccattgtcgaggagcttgagagccgcatcgttatggcacatcgctcatgctatacgcaaatgacgacggacctgaaacgagtacttcgggaaacggagatttcttcctccgctcttgcggcttccgagagccggctgtacggctattcgctgctacgcctgcttccgtcgagatacgccgagaaactgggtttggagcgcgaagccttgcaggatgtgcaacagatcggcgattttctcgatcatctggacggggatcgcatgaatatgctgatgcggtcggtgatcttcgactgcatggaccatatcgaagagttccggcagacggatgaaacgttcgagcttcaactgctgcgtcagttcgccctgcaacaggacaaggaggcgagcgagcgtgtgatcgcggagcatctggatcgcctggagaagacgcaatccagactcgaagagcagcttcacgctttggagcagcgcaaggcgcaggagttggccgccgaggtggaagccttcgatccggtggttcccgaggatcctgacatcccgcaggagaaccctgtggaggatgttccggagcctgaaggagagccgttagacccggatctgtggccggaagcgtcagcatcgcttgcggcataacagttataaataatgtcgataccgggaggagcggataaccgctcctcccggctttttattccctaaccaaaccaacaccattatgacaaaaccgagcgaacatttccgggatacgatccgggaatatctggagcagcgtgcaggcgcggatgcgcttttcgcggcctcctgtgccaaagagcataaaaacctcgacgactgcatcacctttattctgaactatgtccagcagagcggctgcaacggcttcacggatgcggagatctattcgctggccgtgcattactacgatgaggacgacatcgacgtaggcaagccgctcgattgccgcgtcgtcgtgaaccatacgatcgttctgaccgaggaggagcagcgcgaggcgcacgagcaggcgcttcgcaaagccaccgaagaagcctatgcgaagataacgcacaagagcaaatcccaacctgcgtcgaatgccgcaaacgcggcgaatcaacaaagtcttttctgagccatgaagccgagaacgaaactgcaacggcgcatcgtggcggcgagcggccgcctgccggagatcacacccgcacagctgcattggggctatgcccatcttctgccacatgaagcgttccgcaccaagaagggaaaaatcacctgcaccgaatgtcggcatacgtggcagggagatcagcaaatcgaccgtgccgtctgcccgcattgcggcgtgcgacttacagtcgtaaccacccgtcggcgcacgtcctggaataagacttacctctctgtggtcacgacaagggagggcttgcaggtcatacgctacttccttctcgaacggcgggtgcgggacggccaccccgcacgctacgaatgctgcgaggtcatgcagcgctggatcgcgcccgacggaaaatacgctaccgtagcacgcctgcgcaatacctggtattatgatgtgtggcgctgcgctacgccgctggagttgcgttcggaatgttggctttacaaccgcatgtccgtcgaacggagttatcctcgccgccgccttatccccgaattgcgaaggacgggtcttcgctacgacctttatgcggaggatcctgtcggtatcttccgctataccctcagtcagcgccacgcggaaacgctgcttaaaatcgggcgccacgacttgttccgctacttctgccgagcgggcgggcgtcggatcgaagattactggccttcgctccgcatctgcctgcgcaacggctaccgcatcgatgatgcggcttcgtggtgcgactatatcgacatgctgggccggttgggcaaggacatacataacgcgcactatgtctgtccgtcggatttccggcaggcgcacgaccgctgccatgcgcttctggcccgcatcgaggccgaggagcaggtcgcacgccggcgtgcggaatacctcgaatacgaggaacagtaccggaaggccaagggcaggtacctcggcatcgctttttcggacggagagatcgaagttcgggtgctgcaaagcgttcaggaatttatcgaggagggcaaggctatgcaccactgcgtcgagcggtatcacgacaagagcgattcgctcatcctctcggcccgcatcgcggaccggagggtggaaacggtggaggtttcgctgtcgcggttgcaggtcgtgcagtcacgcggggcgtgcaataggaacacggagtatcatgaccgcatcgtccgcctcgtgaacgacaacatgtctcttgtccgagccgcccgccataaaagagataaagctccccgtattgcaacgcttggccgcgctgcatcggacaggctgaaggtttctgcataa

SEQ ID NO: 583 - DNA, 5080 bp, unidentified
  source 1..5080: mol_type = unassigned DNA
atgagacacaattttttgagaagaatcctgggaggaatactgaccggctgcatacttgttacggcaactgtccatgcaggaacgacacagaaagatattgataaggcaaaagaccagatcacagaccttaagaaacagaaagaagatgcgaaagatcaggtggacagcctgaccaatgaaaaacagggattggagagcgaccttagcggactgaacggacagttaaatacgatcacttccgatatgaaccagttagagcagcaggcagcgcagaaagaggacgagatcaatacggcggcggaagatctgaaacgttccgaggaacgatctgcagaacagtatgaagatatgaaagtgcgcattcagtatatttatgaaaatggcaatcagtctgtatgggacatgcttattcatgtgtcctccatcgcagaatttttaaatcaggcggaatatacaagtgcaatcaatcagtatgacagaaatatgcttacggcatatcaggagctcacggagcagatcaaaaaacagaaaaaggaactcgaggagcagaaggaagaactgactgtattacagcaggaaaaacagaaagagcaggaaaaagtcaacagcctgatcgaggatacgcagaagaagatacaggaatccagcgagaaaattgaagatgcacagtccgatgtggaatcgatcgatgcaaagatcgagaaaatgatcgaatacgaaaagcagcttgagatacagaaggcaaaagaggatgctgcgcgccttgcagccatcaaaaagcaggaacaggaaaacaggtcgaatgtgacatacgcaccggcacagagcgatgcgtatctgttagctgccatcatccagtgtgaggcatggggcgagccatatgatggaaaacttgcggtgggcagcgtgatcatgaaccgtgtcagaagctcctattttccgaatacggtttccggtgtgatttatcagggagggcagttctctccggttgccagcggtcgtcttgcataccgtctggagcagggagtcgattccgattgtatgagtgcggcacaggcggttctgggtggaatgagcacaacaaattgtctgtattttcgtgtgaataacggcattatagaaggaacagttataggtaatcatgtgttttattaaacaaaatgataaaatgataaaaatttaacaaaaaaccccgcaaaatggagcaaaaaggaagtaaaaaattgtttacaaagatgaaaaataaagaaagctattgcaattaattgtgaaatatgttagcataagaaagtacaagaaatgcagaaaaatagctgattacatagcaaataagctttttaaaatgaaagaaaaaaagataaatttcaaccgaaagtttgaatttatttttttaaaaaagattgttaaaaaattaacagcatttttcggcaactttaaagagaaagaaacaaattctctgcaaaagcagagctttgtgttaaattgaaaggagaattcaaaatggcaaagaaagtagttttagcaggtgcctgccgtaccgcaatcggtaaaatgggtggagcattaagcaatactccagcagcagacttaggtgcaatcgttatcaaagaggcattaagaagagcaggtgttaaaccagagatggttgacgaagttaaaatgggttgtgtaatccaggcagctcagggacagaacgttgcacgtcaggcttctatcaaagcaggactcccaatcgaagttccagcaatcacaatcaacgttgtatgtggttctggtttgaaatgtgtcaatgatgcagctaccatgatcatggcaggagaagctgatatcgttgttgcaggtggtatggaaaacatgtctatggcaccatatgctatgacaaaagctcgttttggatatcgtatgaacaatgcaacgatcatcgatacaatggtaaatgatgcattaacagatgcattcaaccactatcatatgatgatcacagcagagaacgtatgtgataaatatggcattacaagagaagaacttgacgagttctcagcaaacagccagcagaaatgtgaaaaagcaatcgctgaaggcaaatttgatgatgagatcgttccggttcctgttaaagtgaaaaaagagatcgttgatttcgtgaaagatgagggaccacgtgccggtacaactgctgagtctttagcaaaattaaaatgctgctccggtaaagagggcggacttgttacagcaggtaacgcttccggtatcaacgatggtgcagcagcaatcgttgttatgagtgaagaaaaagcaaaagagcttggtgttacaccaatggctacatgggtagcaggtgctcttggtggagttgagcctgaaatcatgggtgttggacctgttgcttctacaagaaaagtattagcaaaaactggtttatctattgatgatatggacttaatcgaagcaaacgaagcattcgcagctcagtctatcgcagtagcaagagatctgaaattcgatatgtcaaaagtaaacgtaaacggtggtgcaatcgcattaggacacccggtaggtgcttccggatgccgtatccttgttacattactgcatgagatgcagaagagagacgctaagagaggtcttgctacactttgcatcggcggtggtatgggatgctctacaatcgttgagagataatagttttttatagtaattcccggggaatgacttcccggggattgcatttttcaaacatacagttaacataattattttcaggaggtaaccgaaatgaaggttggcgttattggtgcaggaactatgggacagggcattgcaaaagcatttgctcaggtagaaggatatgaagtagcactttgcgatatcaagcaggagtgggctgaaggcggaaaagagaagatcaaaaaaggttatgcaagattagtagaaaaaggaaaaatgacacaggaagctgttgatggcatccttgcaaaaatcactccaggtttaaaagaagacctttgcaaagactgtgatctgatcgtagaggcagctttcgagaatatggaagtaaagaaaactactttcaaagaattagacgagatcgcaaaaccagattgtatcttcgcttccaacacatccagtctttctattacagagattggaaacggattaaaccgtccaatggttggtatgcatttcttcaacccggcagaccgtatgaaactgatcgaggttatcgctggtgtgaatactccggatgaaactgtttccgctattaagaaaatttctgaagagatcggaaaaactccggtacaggttaatgaggctgctggtttcgttgtaaaccgtatcttaatcccaatgatcaacgaagctgcattcatcaaaatggaaggtgtttccgatatcgctggtatcgatgcagctatgaaacttggtgctaaccacccaatgggaccgttagagttaggtgatttcatcggtcttgatatctgccttgctatcatggatgtactttacaaagagacaggcgacagcaaatatcgtgcatgcccactgatccgtaagatggttcgtggtggtaaccttggagcaaagagcggcaagggattctatgtatacaatgctgatcgtacaaagactccggtcgatgctcagtaaaataaatatttatggaggaaaattagatcatggatttcactttagacaagaaacatgaaatggcgcgttccttattcaaggaatttgctgaaacagaagtaaaaccgcttgcacaggaaacagatgagacagaagctttcccggcagaaacggttaagaaaatgcagaaatacggattcatgggaatcccggttccgaaagaatatggtggacagggttgtgatcctcttacatacgttatgtgcgtagaagagttatctaaagtttgcgcaaccacaggtgttgttgtatctgcacatacatctctctgcatcgatccgatcatgacatatggtacagaagagcagaaacagaaatatgtaaaaccacttgcaacaggcgagaagttaggtgcattcgcattaactgagccgggtgctggtactgatgcacagggtgcacagacaaaagctgttttagatggtgacgagtgggtattaaatggatcaaaatgcttcattaccaatggtaaagttgcagatgtttatattgtaatcgctatcacaagcatcacagaggacaagagaggcagaaagaagaaaaacttctctgcatttatcgtagataagggagctcctggtttctcattcggaacaaaagagaagaagatgggtatccgtggatcatctacttatgagctgatcttcgaagactgcagaatcccgaaagagaatctgttaggaccggaaggaaaaggttttccgatcgcaatgcacacacttgatggtggacgtatcggtattgctgctcaggcacttggtatcgctgagggcgcattagacagagctatcgcttatacaaaagagagaaaacagtttggacgttcaatcgcacagcagcagaatacacagttcaaacttgctgatatggctgcaagaatcgaagctgcacagcttttagtttacaaagctgcaatggcaaaagctactcagaaagtatattctgtagaagctgcaaaagcgaaattattcgcagcagagactgcaatggctgttacaactgaggttgttcagttattcggtggatacggatatatcagagagtacgatgtagagcgtatgatgcgtgatgctaagatcactgagatctacgagggtacaagcgaagtccagcgtatggtaatctccggtgcactgttaaagtaatttcgaatcaatccgcgtaaaatttaaacatataaaacataaggagtgaaaaatacatgaatatcgtagtatgtattaaacaggttcctgatacaaagggcggcgttaagttcaacccggatggaacgcttgacagagcagcaatgcttgctatcatgaacccagatgataaagctggtcttgaagcagcacttagaatcaaagatgagacaggagcaaaagttacagttcttaccatgggacttcca

SEQ ID NO: 584 - DNA, 8506 bp, unidentified
  source 1..8506: mol_type = unassigned DNA
atggcagcaagaatttcaaaggcggatttcgatgaaaaagtattaaaaagcaagcttccggtaattgttgatttttactcggattcatgtgtggcctgcaagaagctggcaccggttctcggagatatcgaggatgattatgaggataagcttcacgtatacaaggtcaacacaaactttgacggagagctcgctgatgagtatgaggtgactgcgaatccgacactgcttttcgtaaaagacgcagaggtcttagacagaaaggtcggcgcacaaaagcctgccgatttgaaggcgtgggttgaagaattattatagttttagattattatataaagcagtctgatacaggataataacacatacagataccacaatctgtgacacaggaggaaataaaatgactatcacagtagcaggagagaagaaagaatataaggatggacttacattaccggagcttatcgagcttgagaatgtagatatgcctgagtatgtaacagtttcaataaatgaggaatttgttgccacagaggataagccaaagacagtgcttaaggatggcgacaatgtagagttcctttacttcatgggaggtggatgctaatggcaatgactgatgagcagatcgagcgctattcacgccacattatccttaatgaggtgggcgttaaaggtcagaagaaattattaaagggcaaggtgcttattatcggtgccggcggactcggagctccggcagccatgtatcttgcagcagcaggagttggcacaatcggtattgtggatgcggatgaggtagatttatccaacctgcagagacagattatccacggaacagccgatgtgggaaaagccaaggtaaagtcagcaaaagagacaatgaacgccatgaacccggatgttcaggtcaatacataccgtatgtttgtagatgcgtcaaacatcagagagcttatcagggattatgatttcatcattgacggaactgacaatttcccggcaaagttcttaatcaacgatgcatgcgtgcttgagaaaaagccgttttcacatgcaggaatcatccgtttcaagggtcagctcatgacatatgtgccgggagagggaccttgctacagatgtgtattcaagaatccgccaccaaaggatgcagtgcctacatgtaagcaggcaggtgttatcggagctatgggcggagtaatcggttcgcttcaggctatggaggctatcaagtatttaatcggtgtcggagagctgctcacaggatatctgcttacatatgatgcactcaccatggagttccacaagattaagcttccaaaggatacacacaactgtgcagtctgtggcgaccatccgaccattctcgagccaatcgactacgagcaggaggtctgcgaggagacagcgggcagattagatgcacctcgtacacaggaataaaaagacagtaaggaaaggaacgatatgagtatcataagaatgaaatatccgtttctggatgaaatagcaaaatatgctaaagagcatctgccggaggaggcgtgcggtctgatagcaggtagtgaggacgaaaacggtcgtctcatcacaaaggtatattacctgacgaatacagaccatgccgaggaccatttcacaatggatccaaaggagcagctggtagccataaaggacatgagagcaaacggccttaagccgcttggcaactggcattcacatccgtctagcccttcaaggccatcggatgaggatataaagcttgcatacgatccaaatgcaagctacatgataatgtcgcttatggcagaaaatcctgtaatcaactcgtttcatatcgagggtggacaggtcacgaaagaggatttacgaatatattctgatgaatattacttctaaatcatatgttaatgttttgagtcgcagcgaaagctgcaaagaaaagtcagcttcatcgaagatggcttttcttttttaaagaaagatgttattatagcatgtatatttaataaaacgaaagagcgtgcgaaaatgaaattaaaaacgaaggaacttacaacatgtgcactttttgcggcacttattgcagttggagcatttatcaagattgatattccacttcctatatacactatgcattttacattacagtggttctttgtgctgatggcgggatttctgctcggggcaaagctggcatcgcttagcgtgatagtgtatctgtgcatcggactggtgggagtgcctgtatttgcggcaggcggtggtcctacatacattttaagaccgggatttggattcctcttaggctttgtgcttgccgcatttttaatcggagctatcacagaaaagcttaaaaagaccaatgcgtttacactcattcttccggcaacggtcggactggtggcatattatacagttggagcgatatacttttactgcatgaagaatttctatgcggcaacacctgtcagctggggcatcgtaatagtagattactgtctgataactgttgcaccggactttatattatgcgtatcggcagcagtgttttctgctaagcttcgtcctgtttttgcaggaatattaaatggttacagtgtgaagaataaggtggaaaataaagcataaagcatataataaagtataaaataaggcatgaaataaagtatggatattggtattacagggagataaaaatggcgtattttccgatgtttgtggatatgacggaaagagagtgtctgatcgtcggcggtggaaatgtggcataccgcaaggtgatcgtaatgctggattttggcgcgaaggtcacggttgtggcagaggatatatgtgatgagctgagaaagcttacaattgatgatatagcaagcgaggataaaacgggctcatatacggcaaataaagaaaacaatcagacggactcggatgcagcagatagaattacgttcataaaaagaaggtttgaacgaaaagactgtgacggcatggaaatggttatcgctgccactgatgacaatgctttaaatcatgagattgcagagtattgcaaagctaaggacatcatggtaaatgcggtcgatcagaaggctgattgcagctttatttttccgtcatacataaaggaaaagaatcttgttgcggcattttcgagcggaggaaacagccctgtgctgactcagtatctgaaaggcaaagagcaggagattcttactccgtttcttggtgagctgaacgaatacatgggacagatccgcgaaaaagtaatagcgcaatatgacactcaagccgagagaaagcgtgtgtttaaagaaatattgtgtgcagctattgataatggaaggattccggaaatatagtttaaagtaaggtattacagattttaagttgttgttcatttataaattataaatggcaaatggcatgatccgtaggagagtaaaatgaggtatttaataggaacgagaggctcaaagcttgctcttgttcagactgattacgtgatagataagttaaaaagagcatatccggatgatgattttaaggctgttatcataaagacaacaggcgatttagagcagaaaaaggcactcgataagattggctcaaagggtatcttcgtaaaggagatagaggacgagcttttatcgggaaagattcatatggcagtccattccatgaaggatatgcctgatgaaccggcagcagggcttacatttgcaaaggcatggaagcgtgaagatccaagggatgttttggtgctgaaaaatgccgcttcactggatgagcttcctcatggtgccgtgataggaaccggaagcaagcgcagaaagtatcagcttttaaagctgcgtcctgaccttaaggtggttggcatacgcggaaatatcgatacgaggcttcgtaagctatatgatggtgaaattatatatgaagaggttgccgataatactgtaaataacaatgagatagctaacgaaaaacagaataagtataacgaatacaggctggatggaatcgtacttgcagcggcgggaataaaacgtatcggaagagattctgagatcacacagtacttttcagagtatgatatgattccggctccggcacagggcacactggcgcttgagctacgtgctgacaatgcagaattgatggcaaagcttgatgctttgtcagatgagaaaaccaatctgtgcgcaggcattgagagagaatttttaaagcaaatcggtggaaactgtcatctgcctgtggctgcatactgtgatattgtaagtgaaaaagaccgcggtaatgacagcaacaaaaataacaggctaaagcttattgcgatgtttggctcagaggatggaaaacagcttgcaaggacagagcaggtatgggatatgacatcagacagaaacaatattgtggagcgtgcggtgcacgatattcggtataaattagaaatcgactaaaaaaatatcaagtcataatttttaatcataataattcagtagaaaaataattaggaaaatcatgagagaaaacacaggaaaagtagtattagttggagcaggaccgggagatacgggcctgctcactttaaaaggagaaaaatatataaaacaggcggattgtctggtgtatgacaggctgtcatcaccagagtttctttcaatggcaaaggcaggctgtgagcttatttatgtgggcaaggaaaatcacaaccatgtcatgaagcaggatgccataaacgagcttttgtacgagaaatcaaaatatcatgagcttgtagtccgtttaaagggcggagatccgtatgtctttggaagaggcggagaggaagctctctacctggtagatagaaatgtagaggtagaagtggtaccgggtgtcagttcatcggttgcagcgcttgcggctgcaggaatacctatcacacacagaggcatagcaaaaggctttcaggtcatcactgcgcacagcagaaaggatgaggaggcagatatagactattcccttcttacagatgagacaatcacctgcgtatttttgatgggacttgcgcatgtaaaaagcattgcagcagggcttatgaaagcaggacgaagagcggatactccggcagcagtgatatcgaacggcacacttgccgcgcagcgcaaatgtataggaacgcttgcggatatcggagaaaaaatcgaggaagcaaagctgacatcaccggctataatcgttgtgggagatgtggtttcactgaatgacaggcttgatttctttgaaaaaagaccgctgtttggaagaaaaatcacagtaccgtatatcaaaacaaacgaattgatagcaaaattacagcagcttggagcagatgtcacaccggttaagacaggcataataaacccgataataattcctgaatttgccgataaggtaagatcagctgactggatagtttttacaagcaaaaatggtgtaagatcatttttctataatctggatctggcaggggcagacatcaggcttatagcaaatgcaaggtttgcggtggtgggaaaagctacagaaaaagagcttgcaaagcatcacataaatgcagatattattccggcagaacagaccggaaaaggacttgcaggagaattgagttcgtatatgggcgataatgatgaaatcaaagtctgcattttctcggcaaaggaggcttcacctgaccttgaggcagggcttaaagaaatatgtgaattagaaaaaattgatgcatatgtaaatgagcaggcatatgagagtattcctgaaagcattggaaacatggtaagtgaagctgtttttacaagcgcatcaaatgtggaaagattttttcatatgctgccggagaatgcatacgtggaaacagcatactcaataggtgaaaaaacaacagcagcattagagcagcacaatgtcagagagatagtacaagctgatgatagcagttatgaagcgctggtagataaaatatcttataaagatgcttttaaagattaagaatttatggtgacaaaagttatataaagttatataataaatgcaaagttatataaggttatataaacttatatacgaaacaaaaagttatataaagttatataaggggaaaacaaaatgcaaaatccatttacattatcattcgggaaaaaaccactgcaatatatatcaagaatctcacagaccaatcagatagtagagacatttaggtcagaaaatcctgcaaaccagctttttatgataaccggggtaaggggatcgggcaaaacggttatgatgaccaatatagtatcagagataaagaaggatgaggaatggctgacagttgagcttaaccctacgagagatatgcttcagagccttgcagctaagatttacagtatgcctcagatgaataaaatatttgtcaatgcaaaactggatttttcagcgtttggactgggcgtttccatagaaaatgcagcaccggttacggatatagaaaatgtgctggaattgatgcttgaaaatataaagaaacataataagcggttactcatttcagttgatgaggttatgaactgtgaatttgtaaaagtatttgtcagttcatttcagatatttctgagacaggattatcctatttttctgcttatgacggggctgtttgaaaatatatatgatctgcagaacgacaaggcacttacatttttgtacagggcgcctaagataatgcttgagccacttagctttacagcagtcaggaaacactatatggatatttttgaactggatcaaagagaggcagacaaaatggcagctcttacaaagggatatccttttgcattccaggtattgggatatctttactgggaaaacagggatgatcacacgatagaagatattttaccggaatatgatcagtgccttgatgagtatgtgtacagtaaaatctggtcggagctgtcagagcttgataaaaaaatattgttggaaatatcagtaagtggtgaagaaaaggtaaaagaaatcagagaaaaactggatatgaattcaggattattctcggtatatagagaccggctcaaaagaaagggggttatagatacctctgagtacggtaaaattactctcacacttccacgatttgaagaatttgtcaaaacgcgccaaatgtaatatactatatccaactgaaacattaacataataaaggagaagcacaatgaaagaatacagtataggtacaaagtgtgtacaggcaggctatgcagccggaaacggagagccgagacagattccgattattcagtcaactacattcaaatatgacacaagcgaggacatgggaaagctttttgaccttgaggcagagggctatttctacagcagactgcagaatccaacctgtgatacggtagcaagaaaaatcgcagctatggagggtggcactgctgccatgctcacatcatcaggacaggcagccaatttctatgccatgttcaacatatgtgagtgcggagaccatatcgtggcatcatcatccatctatggaggcaccttcaacctcatcgcggtaactatggcgaagatgggtattacagctacattcgtatctcctgatgctacagaggaggagctgaatgcagcattcagaccaaacacaaagcttatgtttggtgagactattgccaatcctgcgcttacggtgcttgatatagagctttttgcaaaggtggcacacgagcacggagtaccgcttatagtggacaataccttcccgacacctgtaaactgcagaccaattgagtggggcgcagatattgtcacacactctaccacaaagtacatggacggacacggagccacactcggcggagcaatcgtagacagcggcaaattcgactggatggcacatgcagataaatatccgggactgtgcacacctgacgacagctatcatggcatcacatatgcagagaaattcggcaaggaaggtgcgttcatcaccaaatgtacagcacagcttatgcgcgattttggttctatgcagtcaccacagaatgcatttatgctgaatcttggccttgagtcacttcatgtgcgtatgccaaagcatgtggaaaatggacaggcagtggctgaatttttggaaaatcatccaaaggttgcctatgtaaactactcagggcttccttcaaacaaatactatgagagagcacagaagtatcttccaaacggaggctgcggagtcgtatcatttggcttaaagggcggcagagaggcagcgtctgcatttatgaaggcattaaggcttggcgcaatcgagacacatgtggcagatgcgagaacctgctgcttaaatccggcaacaagcacgcatcgtcagatgaatgatgagcagcttaaggaagcaggagtgccggcagagcttatcagaataagcttaggtcttgaggacaaggtggatttgattgcagatatctcaaacgcactcgacgctataaaataa

SEQ ID NO: 585 - DNA, 13659 bp, unidentified
  source 1..13659: mol_type = unassigned DNA
atggagaataatcccgaaatagcgcttgcatggcaattcattgaaaacacaggcactcatctttttttgaccggcaaggcaggtaccggtaagacaactttcctgcgaaaactgagggcagagagtccgaaacggatgattgtacttgcaccgacgggaattgccgctatcaatgcaggcggtgtcaccatccactcctttttccaagtacctttcgctccttatgtgcccgaaagctcattcagcgcagatggcaaggcaacctaccgttttcgttacgggaaagagaaaatcaacattatacgcagcatagatttattggtcatcgatgaaatcagtatggtccgtgccgacttgctcgattcggtggatgccgtcttgaggcggttccgcgaccggaacaaaccctttggcggcgtgcaactgctgatgattggcgacttacagcagctgtctcccgtagtgaaagacgatgagtggcagatgctgcgcaaatactatgacacgccctattttttctccagccaggctttgaagcagacggaatactgcactatagaactaaagaaagtctatcggcagaacgatgggacttttcttgaattactgaaccgcattcgcgaaaaccgttgtgacgggcaagtgctggaagccttgaaccgccggtatattcccaatttcgtaccagataaagaagaaggatacatccgcctggtgacccacaattatcaggcccaacggattaatgaccatgagctggaacaacttccgggacgctcgtatgcctttcgtgccaagattgacggaaagtttcccgaatattcctatcccacggatgaagtactggaactgaaacgcggtgcccaggtaatgtttgtgaagaacgacatctccggtgagcaccgttactacaatggcatgattggagaggtgacagccgtgtcggcagatggaattgaagtgcgcagtaagggaagcgacgctaccttcttacttcaagaggaagagtggacgaatgccaaatacgtgcttgatgaggaaaccaaggagattacagaagatattgaaggaacattccggcaatatccgctgaagctggcgtgggcgattaccattcacaaaagccagggactgacgtttgaacgtgccgtgattgatgccagtgcctcctttgcgcatggacagacctatgtggctctgagccgctgcaagacattggagggagtggtgctcagtgccccgctttctgcaaaggccgttatcagtgaccatgcagtagataccttcacgatggaggcacggagaaacgagccggacgagaaacgcttccgttccttgcagcagacctatttcctggaactgctgtcgggcttgttcgatttccagcccatggagcaggctttgcggcggtatgtgcggcttatagacgaacacttgtacaagctctttcccaagcaactcgcagcctgtaaggaggaaatggaacgttttcacgacaaagtgacgaaagtagcccagaagttcagtatccagtatacccgcctgattgatactgcgcaggactatgcagccgacccgactttgcaggggcgcatacactctaccgccacttattttcaagagcagttgcaaccgctggatgcggtgatggcgagtacggtaacttctgataataaagagttgaagaagaagctccgggatgccatggaggagctggaggaagtgtttgacatgaagactgatttgctggattatgtgctggagaatggtttccatatggcaggatacttgaagcagaaagcactgctttccattgatgattcggcttcgcagaagggtaaaggcaaagggagaagtgcttctgccaaagaagggcagggaagcagtaagcaagctgataaagagaaacgtccgcgtgagcggaaacgcgatgctgcggctgttgaagtacccacggatgtgctgcatccggaactttacaaccgcttggtagcatggcgcaatgcagaagcttccgcattagggctgcccgtatacaccgtcattcagcagaaggcaattctaggcatcagcaatctgcttccttcggataaggccatgcttgtacgcattccgtatttcggaaaaaaaggggtggagaaatatggagatgtgattctggagatggtacgtgtgtatcgcaaagagaaaggactggcagagccggagttgctgtagtcgaatctgctgccatccgcacctgcattatttaccatccgaacatcagctttattccttcctccagcgtatacggtcgataccccagtttccggcgtgccttttctatactcagcccgctgaaacggggacgtggtgtcttttcgttcatctccttcgtagtgacgggacggatgagcgagcgattcagccccaatacgtccgctacccgataagcgatgtctgcaatggtcaggcactcgctgccacagagatgatagataccgttttgcggatgacttatcagcttctccactccttgcgacacgtctcccacgaaggtgggcgtacgccattggtcggatacgacgaacacttcctcattgttccttaatctgtttgccaccagttggagcacatttccatgctgtccgggcagggcggcaccgtacaccaccactacgcgcacgatggcataatccctgcaaacggcagcgatacgtttctcaccttccagtttggtgtagccgtaataattaacgggagcgggaatatcctcctccgtatagggtcggtccgtatcaccaccgaaaacgaagtcggtggaaagatggataaaacggctgcctcccgcctcacagcattctgccagatgctccacggcagtaatgttgacggcatccgcttctgcatggtgcgtttcgcaataatcggggacggagagggcggaggtattgattacaacatccggctgtacttcctggaaaagcttttccaccgcctggcggttgcatatatccgtacggataaagcgatagtcgcccgaatgaggacagatgtcgtcgtgcagggaacagcccgttgtctggtaagactgattatgggataaatcgtccaggatgcgcctgccggtaaaaccgttggcgcctatcaccaatattttccttttcataattacgtttataaatgcgcgattgaagacagacaaaagaagcatgctggggctgccagagtcacattgtcacttcggcccctttcaatatggatagttccttccctgctgcacttcaatgcgtatgccgaaggctccgttggctgatttcagctcgaacgcccctttgaaattgttcttttcccaaggcagtgcggaagggttgggcactttccagccgtccttgtcatattcgccgtacgtatggatgcgcatgccgttcttcaaagtgaaacttcccatttgcaggttgtcggtagagccccagaagcccgtcagtccgaaggggtttgaactgaaataccgggagttgctgagtgagaatatgttcgaaaggccttgtgaataagtcacgttcgggttcaactggaagatgcggctatagtccttgctggcatccggtatctccaaggtgaatttgggaagagtgggggcagacagattcatcagccccatatccagcaggaagccgtcgtaattcttcacgtccggcagaagctccttttcagacggagacatgccttcgggagacgcttcgccatgtactgcagtacgtaccgtatcggcaggcatctcgctctgtgcgctgacggatgacatgcctgcaagtaaaatgatgatgcagaagaagattcgtttcatagttctttgttcacaatttcagttgctgtccaccgcataggggcagactgaacaaagatactcgtttccctctatttccggaaatatctttgtattatttctatttctttatacgaatggtaggggcgaagacgggcgaagtcacccttttcattttggtggggtcgtagctccgttccaggcctccgttgaggtcgagccagtccgtcactttcagttccagtaccatgccataaccgctttgcggatacatcgggttcatatatccatgaaaggagttgcttctcccgtagcccgaatactggccgaaggcatgcaggcgcatgtagggattgatgcggtaggatacggaggcattgtagcctatgtcccattgagtacctcggggggcatcccttttggcatactgggcaccggtaatggatgaaggttgggagatggaatagtgggcggcatatacccctccgctcaattcccaatgtccgtcgggactgtaataagtgactcctgcgccagcctgcatgatggagcccattgcaggataggtgttatggctgccgtacatcgtcagtacgacttccggcgagagcaggaaatcggcgaaacgctggaagtcccattcaaagatgtttttctgaaagtgtatcttcttcatgtccgtccagggcaggggctccacatagtcggagggagggagatggagatttatctcttcctgctgttcgccttgcagactttgttggggctggctttcatcaaggcccgtacgcttgttctcttttggagaaaagggaatctgctctttctttacgggaggccggttctttattgtgtcttccggaatctcgctctgtgcataggcgcagagtgaggaacagataaaagtaatgaataataactttttcataaatagtagtttagttttagtttagttcactattagtttatatcctattccccgcacattgacgatacggatgcgctcgtctccggccagtttatgccgcagtttggtgatgaacacatgcaggctgcgggagttgaagaagctgtcgtctccccagaggtcgagcaatacattctgggtgttgaccacctggttacggttctcgcaaagacgtttcagtatctcggactcgcggtgggagagttccacttccgtatccgcgttaggtgaagtcggggtgcctgcaaaagcaagtcgttgagtgacggaattgaaacggtagtcaccgatttcaaaaacggtagtttctttgggcttttcctctgtaaaggagaaagctttgcctaccagggcctttatgcggataatgagttcctgcattccgaaaggctttttcaggtagtcgttggcacccagctcaaacccttccaccacatcgttgatggtggagcgggcggtaaggaacagtaccggggtctgtttgtcggtctgccggatgcggcgcaccatttcaaagccgtccatgcggggcatcatcacgtctgccaccagcacgtcgggacggaggtcgaagaacttgcgcaatccctcttcaccgtctgctgcggtgtggatgatgaagttctgcccttccaatgtgtccttgataatcatggcgagggtctgttcgtcctcaaccagaagtacggttatcttttccataattgtcgcttttgttacaagtaatgtaaagctccttaacaagtaatgtaaagtaccctaacaaataatgttatcatatccttatcgtaaaggtacttccttttcccaactcactctttaccgatacgctgccaccatgcttctctatcatggtcttcacatagaacaatcccagcccatagcctttcacatcgtgcagattacccgtgggtacgcggtagaatttgtcgaagatgtgcttctgcttctcgggagcaataccgataccgtggtcgctgacggagatttcggtctgttcattctgcccttcgacggttaccttgcggcaatggatggccacttcggcttctccgtgcgaatatttgatggcgttgtctatcaggttgctgatgatgttgctgaaatgcgtacggtcggcaagtacgctcaaatcttccggttcgatgtccaccgatatgtggacggagctttccgctttcagcttgtgttgttcgatgagcgtttccagaatatcacgtattgcaaactcctccgggtgcaggcggaaagtcctgcggcgttccatactcatggaaagtatctgttcaaccagtccactgaggcgctgaagctgttcctggcagatacgcaggtatttgtcgcgtttggccttttcctccgcttggttgaagttgagcagagcgtcgttggcggcatatgctacggcgatgggggttttcagttcgtgggtgatgttgttggtgaaatcgctcttcatctcttccagtgtcttctgtttcaggatggtgcgtatcaggaaccagaaggagaaagcgagtacgatcagaataacgaatgatgtggtgagaatgcccgacatctgtcgcaagaccaacatgccggccggttccatgatgagacggtagctttgatttgtattgatgtcgaaagaataattatattccacggcttttgaggtaggcacatagccgggggtaccgatgtttaccaatgtatctatatagagaatggtagagtcccatttgctgcctttgtgaagatgtagcagcctatggggaagattgatgttacggtcatgcaggaatgaagtcagcaggctgtcataaagcactacgtcggggtcggaaatgatgtccagtcccgaatgcagtccgcgctggaggtaggtggcgagttccagcatactgttttggtcgcgcaaaatcacatccagtccccctttggcactcaatgcggattggggagatctgtctgagtccttgactgcttcttccagacgctctcgggcagaatcggcagacatccaacggactttatccgtttctctgtgctggtcgatgaaaagcacactgtcctctttggtgagcaaaggaacgttcttcctgacactgacttccacgcgggttgaatcgttcgggtgggtcacgtaaacactgtctcctttgggcatgaaggtttcgtgcagggtagcgttgtccaaagaatcttcacgggagatggtggtactgctacggacaaatgattttccgtcatcgctgtatccggctgatacgctgacttcaccgtggtttatgtcgtcctgcttcattttatccacgcgtatcatcatttcgttatagtcgctcatgcgcatggcttcggtgatgtccctttccatttcactgtgcatggtatggtagagccccgtcagccagtaggcttggtaggcgaagatgccggccagggagacgatgacaagtatggcaatatatttgaatggcagtttcatgtttgtttccggttacttttatacatacaaaggtaagattaatattgtgaaccctatcatccgataagactaaataacactcccgataacactggataacacttggtaagccgctgataacacaagtttctgctgattctgccgtactttgcagacgaagatttgcagaagaagaatataaacataaataaaaagaaggacatgaaacgattctatttactccctattgtatgctgtgctttgagcatcagcctttcggcacaagagaacaacggtactgcaaccacctccggtgcggacgacaaccgcatcctcagcgccgacagccttatcacgaccgatgcccgtctggacagtctttatcagaccttgccggaagtgatgattaccggtgaacgccccatcgttaaggcagcgcaaggcaagctggtgtacgacctgccccgccttatccagaacctccccgtagacaatgcctacgatgccgtgaaagagcttcccggcgtcatcgagatgaatggagggctgcagttggcaggtcagggagtcaccgttatcctggacggcaaagtaaccaccctcagcacagagcagctctattccttgctgcgcagcatccctgccagccgcatagagaaggcggaagtgatgtacaacgcccctgcacgctaccaggtgcgtggcgcacttatcaatatcaccttgaaacaatcggtaggcggccccggctcctggcaaggcgaactctatgccaagtattgccagaagcataacgaaggctttgaggaacgcgccagcctgctcttcagcaaaaataaattctcagcagattttctttactcgcacagccatggccggggctactctactaccgacaaagaggctgtgcacactctggcagacggctcagttcaccccatgacaacagatgaggtgggccgtggccgcagccatacccataatttcagggtaggggcggactataacatcgccaaggaccatcagctgagtttcgtctataacggtggctattccacctcccacaactggacgggcgtgacgggcacgcaggtgtccacaactcatggcaatagcaccgactggctgcacaacggccgtctggactatcgtacccctttcggcctcaaagccggtgccgaactgacctactaccgttccccgtccgaccagttgctgcatagccgcatgcaggacgaggaacttgacttctacaccgaagattgccaacgcatcaaccgatggaaattctttctggcccaggagcacagtctgggaaaaggttgggatttgaattacggagccatctatactaccagcatcgacaacagctaccaatattattatgaccccgaaaccggtggacaactgacctcatcggatgccttgagcaatatgaagtcccgccgccgcgagcagacctggaatatctatgcaggtttcagcaagagtttcggcgacaaacttgctttggacgcttccctggctgtggagcattacaagactcccgtctggaaccagtgggactggtatcccatcgtcaacttgaactatatgccggcaccgggacatatccttcagctctctctgagcagcgacaaggactatcccgactactgggcggtgcaggatgccgtctcttacatcggtggcggatactctgagctgcatggtaatccgttgctgaaaccggcgcaagagtatgagcttaaaatgacctatattttgaagagcaaatacatcttcagcgcttggttcaaccataccaaggactactccgtacagacgctctaccaatcttccgaacgtctggttgaaatctacaagacactcaattttgattatcagcaacaaacaggtatacaagcctctataccgtttaaggtgaagaattggttgaattctcgtcttaccctcatcggcttgtggcatcgcgaaaaggatggtgatttctgggatattcctttcgatagaaagcaatgctatggcattgcccagatgaacaatacttttactctctccaccaaacccgacttgaagctgacagtgaccggatttgtgcatagtaaagccattcagggcatctacgacctgcctacgtcgggcaatgtgaatattgccctgcgctatggcttcgccaagaacaaggccatccttaacctctactgcaatgacatttttgagacgggacagatttctccccgcatccgcttcaagacgcagaatgtgacgaatcattactcatgcttccgcgaattcggcgtatcgtttacttataaattcggtggatataaggagaagcaacgggaggcggtggatacgtcgcggttcaaatagatagaagatgcaggtggtcaggtgaaaatacggtattcttttgtactttgccacatctttcgtacttttgcaactttcaaaacattaaagttgttatttaaagaaaagactctgtatgaaatcggacattgaaatagcccgcagcatagagctgaagaagataaagcaggtggctgaaagtgtggatatcccgcgtgacgaagtagagaactatggccgttacatagccaagattcctacgcatctgattgatgaagagaaagtgaagaagagcaatctgatactggtgacggctatcacggctacgaaagcgggtatcggtaaaacaaccgtgtccatcgggctggcattggggctgaacaaaattggcaagaaagcgattgtggctttacgcgaaccctcgttaggtccttgcttcggcatgaaaggcggtgctgccggtggaggatatgcccaggtgcttcccatggagaagataaacctgcactttacgggcgactttcacgccattacctccgcacacaacatgatttccgctttgctcgacaattacttgtaccagcatcaggcagacggcttcggactgaaagaaatcatctggcggcgcgtacttgatgtgaatgaccgttccttgcggagcattgtcactggattgggaccgagcaccaacggcattaccgaggagtcgggcttcgatattaccccggcttccgaaattatggctattctctgtctggcaacggacctcgacgacctccgtcgccgtatcgaaaatattattctgggattccgtttcgatggtactcctttcacagtgaaggagttaggagtagccggtgccattaccgtactgttgaaagatgctatcaaccccaacttggtacagactaccgaaggctctgctgcttttgttcatggaggaccgttcgcaaatattgcccatggttgcaactccattcttgccacaaaaatggccatgacatttggcgattatgtagtgacggaagccggtttcggggctgacctgggtgcggagaagttctacaacatcaagtgccgcaagagcggcctacagcccaagctgacgataatcgttgctaccgcacaaggactgaagatgcatggcggtgtcagtctggaccgcatcaaggaacccaatatggaaggactgaaagagggcttcggcaatctggacaagcatgtacgcaatttgcgttcattcggccagcaggtcatcgtggcattcaaccgttttgccagtgatacggacgaggaggtggaagctatccgccgccattgcgaagaaaagcttgaggtaggttttgccgtgaacaacgcctttgccaaaggaggagagggagccgttgaccttgccaatctggtagtagatactatcgagaacaaaccatccgaaccgctgaccttcacctacgaagagagcgattgcgtggaacgtaaaatagaaaaggtagcctgcaacctctacggggcaagcgtagtgacttacagtctccactcccgcaaagttatcaaactgatagagcagatgggtatcagccattaccccgtctgtattgccaagacgcagtactccttctctgccgacccgaagatatacggtgcagtcaacaactttgagttccacatcaaggatattgtggtcaataacggtgcggaaatgattgtagccatcgccggtgaaattctccgtatgccgggattacccaagaaaccacaagccgaacacattgatattgtggacggaaatatagaagggctgagctaaacgcgcggagcgcgtttagaattaaaaattaagaattaaaaattaaaggctgcgcaatgttcgctttgaactgcgcagcctttaatttttaattcttaatttttaattctgtttgcttattaataagcaaacagcgggtattctttcatcttcgcattgacgcgtgcacgtacctctgcgatgacttgttcgttgtctacgttggacagaacggtttcaatcatctcggcaatttcgagcatcaggtcttccttggcaccacgggttgtgatggcaggagtacccaaacggatgccggaagtctggaaagccgagcggctgtcaaacggaaccatgtttttgtttacagtgatgtcggcagataccaacgctttctcggcaaccttaccggtcaaatcgggatatttgctgcgcaggtccaccagcatggagtggttgtccgtaccgccggaaacaatagtgaagccacggtccatcaaggcttgtgccaggacagcggcatttttcttcacctgcttggcatattctttccattccggttgcaggatttcgccgaaagcaacggctttggcagcgataacgtgttccagcggaccaccttggataccagggaatacagctgaatccagcaactgggacatcatcttgatttctcccttcggagttttcttgccccaggggttggggaagtccttacccatcatgataacgccaccgcgaggaccacgcagagtcttgtgggtagtggaggtcacgatgtgggcatatttcacggggttatccagttcaccggctgcaatcagtccggcaggatgagccatgtcaatcattaggatggcacctatcttgtccgcgatttcgcgcatgcgcttgtagtcccattcgcgggaataagcagaaccgccgccgataatcattttgggtttctcgcgcagggcaacttcttccatctggtcatagtccacacgtccggtttcctggttcagattgtattcgcagggagtatagataataccggaagtgttgaccagtgaaccatgggagaggtgaccgccgtgtgcaaggttcagtcccatgaatttgtcgcccggattgagcacggcgaggaatacggctgcattggcttgtgcaccggagtgcggctgtacgttggcccattctgcgccgaagatctgtttcaagcggtcgatggcaatctgctcactctggtccactacctcacaaccaccatagtaacgcttgccggggtatccttcagcatacttgttggtgaggcaggagcccattgcctgcataacctggtcacttacaaagttctctgatgcaatcagttcaatgcctttgagctgacgttggtgttctttttcgataagttcgaaaattaaatcatctcttttcattctgcttattagataagtttgataaatctgtgttctcttattaagcgcacaaatttacgggaaataaatgaataaattgaaagaaaaggaagaaatttactgtcaaaagaacactccgaaagaaaaactcagcacattgtccctgcggtgaaaacggatttcgtttttcgtgttttcgtctgcagcgttgttgtcggccggaatatcgtatgtcacgcttttggagatgttatgcagccccatgtcgtaacggaagtcgaaaaagacgcgtgagatggtgacggatacgccgacggtgaaactgagattgagcggacgcagcctttcacggatattcacctggtcgaaattctcgaagtcgatgtcacttttcctgtcccatatatagcgcactttgggtcctccaaagacggcaaggctgtacggcccctccttgatgaagttgtatccgtagatgacggggatgtctatactgtggatggacgatgtaatggaggcttcctccagccgggctcctgatgcggcgtcttcgggcagaggtttctcgaaggtgatgttgcaccggttgatgttgtaggatatttccggttgcaggaagtggcggtcgaagtttatccgcatgaaaagggaaccgaaatatcctatcttgtaattgttctgcacttcgtcaatgggtactccgttgacactgaactgggatacaaggaacaaggaagaggtgaaaccgcctttgaaaccgaaattgaccggagtttccttgcggtgtccggaatgctcttcgtcggcagtaccgggcacaaccggagtctgtccccacatcatggcggggaaggccaacagatataagcccatcaagattcgtcgcaactccat

SEQ ID NO: 586 - DNA, 7216 bp, unidentified
  source 1..7216: mol_type = unassigned DNA
ctaatccttaatcccttgtttcaagtattcgtaaaagctatattgcgaccgtaccttctccttttgcggtcgcgacgacttccagcggtttcgcaaccggtcgtccacaaagcaggctttccgtttgtccgacagttgtatggatagcatatcgatgagctcttgcttcaagtccgggtccagaatgggggtgacggcttcgatacggcggtacaagttacgccgcatccaatccggcgagccgaggaagagcttgggtgcgccgccgttgccgaagtaccacacacgggcatgttccagaaaggtatccacgatgcgtgtcacgcggatgttgtggctgtactcctgcccggggatgaggcagcagatgccgcggacaatgaggtctatctctacaccggcttgcgaggcttcgtagaggcggtctatcatggcagggtcttgcagggcattcatttttaggataatccgtccttgcttgccttgccgagccagttctatttcgtgattgatgaggcggttcagttcaggaatcaggttgaagcgggccacaagcaggcggtggaacactggattttcctttccctgcagagtacggaacaagttgtgcaggtcgtttacaatcaccgggttgcaggtgaatagtccgctgtccgcatagagggtggcggtcttttcgttgaagttgccggtgctgatgtaggcgtagcttgtcagtttgcgcccttccttgtcgcggcgtagcacgagggctactttggcatgtacctttagtcctggtatgctgaaaatgatgttgatgccggcggctttcatcatctcggcggtggcgaggttgttttcttcgtcgaagcgggctttcagttccacaaagacggtgactttctttccggtctgtgcggcggctatcagggtgttgatgacggtggagttctctgccacgcgatactgggtcaccatgatttcacgcacggtgggttcgtggacggcttcatatagaaaatggatgaagtggtcgaaggagtggtagggataatgcagcagcaggtccttcttctccacatagcggaagatggattcgcgttcgtccaggcaggtcagcttcatgggctggggtttcttgatgggacgtacgctttggttgggattaggcagatgccgcaaatcctccatgttgaggtgcttgtctcccggcaccagctcccggcggtctatgcggtaggcatctaccagaaagtcgaggaagtcctggggcatggcgcggtcgtatacaaaacggcacacggcgcctatcttgcgtttctttaccttcttcttcacctgctcgatgatttcggaggtattggcggcatcgtctatcagaatatccgcatcgcgtgaaatcttgatgcaataactgctgtccacttcataaccggggaagatggtatccagattggccttgatgatgtcttcaatgaacatcagataatagtctttccccaccttgggcagctggatgaagcgcggcactttgctgtacggcagtttcatcacgaaatactggatgcggtttggagaactggcgggagctcctttcagatgaagccgtacggctagatagagacggttgtcgcgcaggaatgaaatcaccttgtccttgcttacgggcaccggggccagataggggaatatctcttcgcggaagaagctgcgcacaaagtcgcggtgaaacggttctacgttgcggctttgatagaatatgatgtgatgtttccgcagggcgggcagtatcttctgttcgtagatgcggatacgttcctccagttggcgattgacttcttggttgatttcatctaccagttcggcggcagactgcatagtctcttcatcgctttgcgaggctccggtggctatggccttatggtcggctacgcgtatcttgtagaattcttccagattggaagagtatatagaaataaagttgatgcgttcgtatagcggcaatgtctcgtcttccgcttccagcagtacgcggtagttgaaggaaagccagctgatgtcacgtttgaaatatctgttgtccatggtgttaaggtgttaatgtggcatattagcacattaccacattgtattcttcccaaatataattacctttgtcttaataaacaaaggaaagatgacaaaagttggtttattatcggatacgcatggctactgggatgaaaagtacctgcaatattttgagggctgtgacgaaatatggcatgccggtgacatcggttcgctggaagtggcacagaagctggcggctttccgtcccttccgtgccgtgtatggcaatattgacgggcaggagatacggcagctctatccgcagattctccgtttcacggtggatggggcggaggtgctgatgaagcatatcggcggttatcccggcaactacgacccttccatcaagggcagcattctggtgcgtcccccaaagctgttcatcagcgggcactcgcatatactgaaggtgaagtatgacaagacgttggatgtactccacatcaatccgggcgctgcgggcattcaaggtttccataaggtgcgtacgatggtacgctttgcggttgatgggggaacgtttaaagatttggaggtgatagaacttgctgaccgatgatgtagtttgtttattttcaatggattgtatttaccgattgtttacgctgtagtgtaaaagccgttacatgctaatgtaaaggtcgttacgctattgggtaaaggccgttacactatttggtaaaggtcgttacacgctgaggtgaagaccgtttcatcaaggggtgacggccgttacgcactgaagtaagcaaaacaatgtaccggagtaagcaaagcaatgaagtaaaaagatgaaaccaagccttcacttaatcgaatttttccattatctttgtacccgaatagcaagtagagccgtggggcatcgtcctccttcttattttattctccattttgaagtatcaccgaaaaagaactgaaatatgaaaggaattattcttgcaggtggcagtgccactcgtctctatccgttgtccaaggctatctccaagcagataatgcccgtctacgacaagccgatgatatactacccgctctctacactgatgttggcgggaattcgcgaagtgcttattatctctactccacgtgacttacccatgttccgcgagctgctgggaaccggcgaagaactcggtatgtccttttcctataagatacaagagaatcccaacggactggcacaagcctttgtgctgggtgcagagttcttggacggcggaccgggctgccttattctgggcgacaacatgttctacggtcaaggcttctccgccatgctgaagcgtgccgcttccatagacaagggtgcctgcatctttggttattacgtcaaggacccccgtgcctacggtgtagtggagtttgatgccaacggcaaagccgtctcgctggaagaaaagcctgccaatcctaaaagcaactatgccgtccccggactgtacttctacgactccaccgtgacagagaaagccgcctccttgaagccctctgctcgcggagaatacgaaattaccgacctcaaccgtctctatctggacgagggcacactgaaagtggagctcttcggccgtggctttgcctggctcgacaccggcaattgcgacagcctgctggaagccagcaattttgtcgccaccatccagaaccgtcaaggcttccgcgtgagctgtatcgaagagattgcctggcgcaagggctggatagatgtagaccagctgtatcgcttgggtgaacagcttggcaagaccgaatatggcaaatacctgatggaactggctgaatcgaagcgatgaactctttgttccccaaaaagagaaggagaatagttctcctataaaggcccgctgactttaatttttaatttataatttttaattctcatgaagacttatctcgtaaccggtgccgccggttttatcggcgccaactatattaaatatatcctggcaaaacataatgatattaaagtggtgatactggatgccttgacctacgcaggcaatctgggcaccattgccaatgacattgacgatgaacgttgcttttttgtaaaaggtgacatctgcgaccgcgtgcttgccgacgaactgtttgccaagtataaattcgattacgtagtgaattttgctgccgagagccacgtagaccgtagcatagagaatccccagcttttcctgatgaccaacatcctgggtacacaaaacctgctcgacgccgcccgccgtgcctgggtcacgggcaaggacgagtccggttatcccacttggcgcaaaggcgttcgttaccatcaagtgtctaccgacgaagtttacggctcacttggtgccgaaggctacttcacagagcaaaccccgctctgcccgcacagcccttacagcgccagcaagacgagtgccgatatggtagtgatggcctatcacgatacctataagatgcccgtcactatcacccgctgttccaacaactacggtccttatcacttccccgaaaagctgattccgcttatcatcaagaatattctcgaaggcaagaacctccccgtctatggcgacggcagtaacgtgcgtgactggctctacgtggaagaccactgcaaagctatcgacctggttgtccgcgagggtgtggaaggcgaagtctacaacgtaggcggtcacaacgaaaagaccaatcttgaaatcgtgaagctgactattgccaccgtccgccgcttgatggaggaagaaccccgttaccgtgcagtgctgaagaaacaagtaaaagccgccgacggcacgattgacatcagctggataaacgaagaccttatcaccttcgtcaaagaccgcctaggtcacgaccagcgttatgccatcgactccacaaagattaccaatgccctgggctggtatccggagacgaagttcgaggtcggcatcgtcaagaccattgaatggtacctgaacaaccagccgtgggtggaagaagtgaccagcggtgattatcagaagtattacgaacagatgtatggaggtagaggttaaggtttagggattagggtctaaccgctaatccttaacctctaacctctcaattcagcgccaccgctaacagtaatcctaagaacagcatattgcgcgacgtctcgcccagtatgctgttcagctttttaccgctacctatctgtatcattttgcgccacgtcagtgcgtgcatatagagatagacgcagggagcccagataaattccagcggagtcagcttgcccgtgtagacaaaccagaagcagagcagcacggcggcgatgcccagtgccagatacatattctcaccgaacttcttgccgtagcgtaccaccagcgtacacttgccgctcacggcatcctgctcgcggtcgcgatagttgttcaccatcagcaaggtgtctatggcgaggccactgacgagcgacagcaccaccacatccatattcagcgtataggcctgcacgtagtaggtgccgcatacgggcacgaagccgaagaacaccagcaccagtacgtcgccccagccccgataggagagcagcgtggtatagaggaaagcaaacagtatgcacaccacgcccagcaccaccagttcccagcctccgtggggcagctgcccccagacggtgaacagcactgccagccctgccaggcacgacagtgtcagtgcgatgccgatgccggttttcatggctgccggcgtaatccaaccttcggcgcaggcgcgctgcggccccagccggtcttcccgacggtcggtccctttctggaagtcgaagaggtcgttgataaagttggcggcaatctgcatgccgcaggcaaagagggcgcacagcagggcgggtgcggtcttgaactgtccgtcgctgaaggcaagggcactgcccagcaataccgggatgatggctcccgtcaacgtcttggggcgggcggcgagaaaccatgcgtagggtgaattctgtttaatctcgttcatcgtagttccaatttagttcggcatctgccagcaaaaatactgaaaatccctatatttgtacccacttatgatgaagaagttagtctacatatccattctttctctgctgctcttgtcttcctgccgttccaagcggatgattaccgtgtcgttgccgcagccagtcatgcaggcagacagcacgcagcttggcgatactatcgggttgcctgcccgcctttcgccgatgttcacctttgaccagtctgatttgcgtaatgtccgccgccagccggcgaagggcgaggtaaagaaacagcagataaagaaaacggcaccggtacaaaaggtaattgtgcagcgaggtacaagaatcacatcgaaaaccacccacgtaggctcggcctataagggcgtcagccgcattaagacgtacgacttcacgcatcgcgacgtgcctgccgccttcgagggcttccgcatcgcctttgtctccgacctgcactacaaaagcctgctgaaggaggagggattgaaggacctggtccgcctgctcatagaccagaaggccgacgtgctgctgattggcggtgactttcacgaaggctgccagtacgtgccacccgtcatggctgccctggcgcaagtgaagacgccgttgggcacctatgccgtgcttggcaacaatgactacgaggcttgctatgacgacatcgtgcgcgaaatgaggcattatggcatgcatctgctggagcataaggtggacaccctgcggcgtggcggtgagcggattcttgtggcgggcgtgcgcaatcctttcgacttgggcaagaacggcacatcgcccacactcggcctttcgcccgacgatttcgtaatcctgctgacgcatacgccagactatgccgaggacgtcccggtgacaaactccgatctcatcctggccggacacacgcatggcgggcaggtgacgctgttcgggctttatgcaccgatagtcccctcgcactacgggcagcggttcctctccgggctgaagtacaactcaaagaacatcccgatgattgtcaccaacggcatcggcacttcgcagaaagccatccgcatgtttgctcccgcagaggtggtgatgattgtgctgcaccggctgacggactga

SEQ ID NO: 587 - DNA, 10049 bp, unidentified
  source 1..10049: mol_type = unassigned DNA
ttaaagtgctttctttatcgctgccatcagttcgtcatatgtctcaaatgccaaaaggtctggattttcatttttgattgcatcagtacttcgaaataaaaatcccgctttgctcgcacgaatcattccaagatcattatagctgtcaccgcttgcgattgtctcaaaaccaatagactgcagtgcctttaccgttgtcagcttagactgctcaattctcatcttaaaacctgtaatttctccatcctctgcgacctcaagcgtgttgcaaaatattgttggccacccaagctttttcataagcggtgctgcaaactgtgtaaacgtatcactgataatgattacctgtgtcatgcttcttaactcatcaagaaattccttagcaccaggcattggatcgatctgtgctatagtctgctgaatctcctttaagccaagaccatgttcctttaagatgcccagtctccacttcatcagcttatcataatctggctcatcccttgttgttcttttcagttctgggatgttgcttgccttagcaaatgcaatccagatctccggtaccaatacaccttctaaatccaaacatacaatattcattgtgttctcctgcctttctcaatttatttattttctactcctctacctcaatgtcaagtccaagctccttcggcagaaaacgcggacatacattgtctgttgtaatgataacagatgcagcaagacgtgtaccgatttcaactgcttcctttaattctttgccatatgtcatgccaatggcaacacctgcaaagaaggcatctcctgctcctgttgtatcgcgcactactaccttgcgcgccggataaatacctttatttcccttacagtctgcatacacggcgccttcaccgcccatcgtaacaacaattgatggaatcttagcgctcacaacatttgctgaaataatatcgcaaagttcctgcggtgtctttccctcatagtcctctgcaaagaaaatgcctgcctcaatctgattgcatacaaagcagtcaaaatgctttaagtaatcacgtcgttccacggcaatgctcatatttgtgacaacaccatacaccctcttattatacttttgtgcaagctggaatgtcttttttatgatttccttatcaatgtccatttccagtacgatggaatctgccttagagatgatctcatctcccttttcctcaagagtatacaaaatcggatacaagtttggtctttgtgagatagaccctgccaaatcacccttgttgtcaaatacagccagccatgttcccattccacccggaacactcttcacatagcttgtatctaccttatgtctttttaatttgcgtacaacatcttcgccaagcgcagatgtatctacgatgcttacatatgtaggcctaagctcaacatttgcaatgtcctccacgacatttcgcgttacgcctccgtgtatgtattcaatccgtcccgcattgcggccctccggcacatatatatcctcaggaaagcctttgatatccacaaatacggcgccgattactacaattcccatggtttgtcccccagtatattacaatcttggagccatcggcagctgccggtgactcctaccctttattgtacaaaacattccacaaaaagcaagcatcattttagttttgtccattgctttttttacataatatagtagaatataactatctcaaaaacttgacgagaataaaaaggaaggttggtattacatatgaaattttttgaaataaaagatggtgcgcttttctttaagcgccgccaggaaattatggaaatttgtccatggggtgccggacttcgtgttcgagctacacaaaatcgaagcttttctgataaggattgggcactcgatgttcctgcaaaggcagacggaaaaattgagctttttgacgatcatgcaatcgtgagaaatggcagtatctacgctgttgttacagactttggacgtatcagtttctataatgaaaaggatgaacttttactaaaggaatattatcgcagctgggattatggaacaaaggattggaaggatcttgatacaatcattatgcagcgtgctgctgcaagaacctaccgtgctgttggaggcgacaactatgcattaagtgtacgttttgaggcagatgataacgaaaaactctttggcatgggccaatatcagcagccacagtttgatttaaagggctgtacacttgagcttgctcagaaaaatactcaggcaagtgttccttatcttgtatctagcaagggctatggtcttttgtggaataatcctgcaattggacgcgcaacgcttggtgctaacgtaacagagtttactgctgaatctacacgccaaattgattactggattaatgcagccgatacacctgcagcacttgtagagcaatacacagagcttaccggacgtgtcccgatgatgccaaaatgggctatgggcttttggcagtgtaagcttcgctatcagacacaagatgaagtattaactattgcgcgcagatataaggaattaaatattccgctgtctgttattgttatcgacttcttccactggacacagcagggcgactggcgctttgacccggaatatttcccagatccaaaggcaatgatcgatgaacttcatgagatgggtgttcgcgtaatgatttccatctggccgactgttgaccgtacaagcgttaactatgaggaaatgagtgagcgtgatcttttaatccgtacagaccgcggcttaaatgttacaatggaatgctggggaatgcagtgcttcattgaccctacaaatcctgaaacacgtgaatttgtatggcaaaaggcaatggaaaattaccgctcacacggtgttgatctgttctggttagatgaagcagagccagagtacactgttcaagactttgatctttaccgctactatgatggtccggcattagagtgtgcaaatgagtatccagctcgctattctcagaccttctttgacggtatgaagaaggaaggaattgaaaaccctctgaatcttgttcgctgtgcatgggctggttcccagcgctatggtgcacttgtctggtccggtgacgttccttctacatttacttatcttcgctatcagctgacagctggcctaaacatgggtcttgccggaattgcatggtggacagcagatatcggcggcttccatggcggaaatgtacatgatccagccttccatgagcttttgatgcgctggttccagtttggtgcattctgccctgttatgcgtctgcacggcgaccgtgatcctcactacaagccacttggcacaacaggcggcggtaaggttgcttctggtgccgacaatgaaatctggagctacacacctgagattcaggatatgatgagttactatatcctgcttcgtgaatccatgaagggttatatgacaactgttatggaagaagctcatgaaaagggaacacctgttatgaagccgctgttctacgattatccggcagacaaaacttgctgggaaattgcagacgaatttctctttggtcatgatcttcttgttgctccagttctttatgctggtgagcgcacacgtactttgtatctgccagagggacgctggtgtgaatatgagacaggtaaggtttatgatggcggctgcacaattactgtggatgctccgcttaaccgcgttccattattcgtaaaagaaggcaagacagtttttgtgaaataactatataaggatttttaaatgaaaaaagaaggctactattcttctggacagttcgcagggatggctcatgtcaccctgcggaccatccgctattatgacaagcagggtattttaaagccctcttttgtaaatgaatctggtgcacgcttttacactgatgaagattttgcgcgtctccagcaaattttattattaaaatatcttggcttctcacttgatgatattcgtgaaatgatcgtagacacaaaagatcttcactacatgcaaaattcccttaacatacaattaaatcttgtgcgcgaccgcattgagcaaatgcagcttgtagaaaaagcgatccttgaaacatcagatgccataaacaagcagcacagcattgactggaaccgcatgttaaatttgattcatctgactggcatggaggaaagcttaaaaaagcagtatcaaaatgcctcgaatatctctgcccgcatcaatcttcaccgcctttattcccaaaataaacagggatggtttccatggattctggaaaactgccatctggcgccaggaatgaatattttggaaactggctgcggtgacggcacgctctggtgtgaggcaaagaaacagttttcccagaataattgtccagatcacaccaaagctcatgatcagcagccagatcttcttaaaacttgctcaattatgctgactgatatctcagagggaatgcttcgtgatgcaagacgtgcaataggcgatggcgatgaattttcatttcgtgaatgcttctgtgaggcacttccgtttgcagatgaatcatttgaccttgttttggcaaaccatgttcttttttactgcagtgatgtgacacaggcgtgccgcgaggccgctagagtattaaagcccggcggacgattcttatgcagcacatatggtgcagaccacatgaaagaaatcagtcgtctcgtgtctgactttgactcgcgcattgtactgtcggcagattgtctttacgagcgattcgggcgcgaaaatggagccgagattctagcgccatattttagtgatgtgaaatggctctcctacgaagactcacttctcgttccagatgccgaaccgctgattctctatattctctcctgccacggcaaccagaatcaatatttgcttgaccactttgcagaatttcgaagcttcgtcaagaaaaaaacagatgctagattctcggtcacaaaggatgctggagtgttttgctgcacgaaatagctgccgttgagccacttgtatttgtgcacttttcacaaactttgattttcccacaaaaagcgcttgaaggtgacgtaacgtcaccttatatactatgcgtgtcaaagaaaaaatgttttgacacgcgacatcatgtatatacgaaatttgattttatttttgaaccactagggacagataaaaagccatcatccctgtccccattagaaaggagtttattatgaccattatcgttaccggcggagccggatttatcggaagcaactttattttccatatgttaaatacttacccggattaccgcattgtatgtttagactgcctgacctacgctggaaatctttccactctggcaccggttatggacaacccgaatttccgttttgttaaggaaagcatcactgaccgtgaggctgtttacaaactgtttgaggaggagcacccagacatcgttgttaacttcgcagctgagagtcatgttgaccgttccatcgagaatccggaagttttcttaaacaccaacattcttggaactgcagttttgatggatgcttgccgcaagtatggcattcagcgttatcatcaggtttccactgatgaggtttacggtgatctgccgcttgaccgcccagacctgttcttcactgaggagactccaatccacacaagcagcccgtacagctcttctaaggctggcgctgacttattagttcttgcttatcacagaacctatggtctgcctgttaccatcagccgctgctcaaataactacggtccatatcacttcccggagaagctgattccgcttatgatcgctaacgcattaaacgacaagccgcttccagtttatggtactggtgagaatgttcgtgactggctgtatgttgaggatcactgccgtgcaatcgatctgatcatccacaagggacgcgttggtgaggtttacaacgttggtggacacaacgagatgaagaacatcgacatcgttaagatcatctgcaaggagcttggaaagccagagagcttgatcactttcgtaggcgaccgtaagggacatgacatgcgttatgcaatcgacccgaccaagatccacaatgagttaggctggctgccagagactaagtttgctgacggtatcaagaagaccattcagtggtacttagacaataaggagtggtgggagaccatcatctctggtgagtatcagaactactacgagaagatgtacgcaaaccgctaatggaggtcgttatgaaagtatttgttactggagttgccggtcagctcggacatgatgtaatgaatgaactggctaagcgcggctatgagggaatcggaactgatattgcaccagagtattctggcgctgctgacggtactgctgttgtttctatgccatatgtttctttagatatcactgatgctgatgctgttgatcgtgttatctgcgagatgaagccggatgttgtcgttcactgcgctgcatggacagctgttgatctggctgaggatgaggacaaaaaggataaggtgcacgcaatcaatgcggatggtactgcaaacatcgcaaaggcctgcaagaagactggcagcaagatggtttacatcagcaccgactatgtatttgacggtcagggtactactccatggacaccagattgcaaggattataagccacttaatgtttatggtcagtctaagcttgacggtgagcttgctgtttcgagtactcttgacaactactttattgttcgtattgcatgggtatttggcaagaacggaaagaacttcatcaagacaatgttaaatgttgccaagacacacagtaccttaaaggtagttaatgaccagatcggtacaccgacatacacctttgatttggcaagactgcttgtagatatgattgagaccgacaaatacggctactatcatgtaacaaatgagggcggctacatcagctggtatgatttcacaaaggaaatcttccgtcaggctacccttcttggacgcactgagtacagtgaggataatgttactgttcttcctgttactactgctgagtatggtctttcaaaggctgcaagaccgtttaacagccgtcttgataagtccaagcttgttgaaaatggatttgctccacttccgacctggcaggatgcagttgcacgatatttaaaagaaattgaattttaataaagaacatgaaatgggatggagttttgtggctccatcccatacttcatagcttataatcccttgcgcatctttctaacccgtcaatcacactactaaattccacaccatactttcttgctttgctgcagtccatccacaaattgtgtcttgcgggtgcgtccttgacgataagcctttttccaagcatatcaacaaacttatttgtcacctcatatattgactgtgttgtttcgctaccaaaattatacgcaccgcctggaagtaaaattaccttgtccatattttcagcaacttcctttaaataagtaatgccacgaaattgctttgagctgaaagaaacactatcttgtgtatgaattgcatttaatatcatcatcaaatagttggatcttttttcataataatcatacatccactctgctcttaacatgactgccgacggcagaatatcaagcacacgtttttccatctcaagcttatgagcagcgtagatatttcctggcttcacattttcttctgtatatggtccacaatcctcacaagcactatacacctgatctgagctaaagcatatcagctttctattattatctttacacgcattcgcaagatacataggaatctgcacatttgcaaagtacgatgcttctggatctgcctcgcaagtacctatatcagaaattgctgctgtgtggacaacaacatcagcattgctttctttaatcatacgattcacaatttcctgtgtcacgttccgaagagacggtgacgctgctgtatccttgcatagttccatgagcttatgcccaacaaatccatttgcccctgtaattaaaatcattttcctctccctgatatttaagctgtaactgctaaaagcagcgttccggccgtaataagtaaaacaccgactgccgatttctttgtcagtttttcgtgaaatacaatccacgagaatgcaatcgttaccaacatactaagcttatcaatcggcactactacacttgctggtccttcttgtaacgcccgataataaaagagccacgacgctccagttgccagccctgacaaacaaataaagcataattctttcttctctatcttatttatttctttctgtttttgtgtaacaaacaccatgagccatgccataagcagcactactgtggtgcggattgctgtgccgagattagaatcaataccttcaattccaatcttccccaaaatagaagtcagacttgcaaatactgctgacagcaccgcatagatcagccatcctccactctttttttcagaatccgtttttatgtcttttttggtaatcatcatcatggttcctattccaataagcagcacaaatattatttttttcccagaaataccttcatgaaggaaaatgaatgccagaagaatagacaacacggtacttgatttatcaatgggaacaaccttgttgatatcccctttttgaagggcatgaaaatagcataaccacgatgcacctgtagctaatcctgataaaatcagaaatagaagcgtcctgccgtcaatctgtcttattcctccccatgttcctgtaatcaataccatgagccatgaaaacaacaatacaactacagttcgtattgctgttgccacattcgaatctgtctttttaattccgcattttgcaaggatcgctgttattcctgcaaaaaatgaagatcctattgcataaaatatccacatttccttaatcccccttctgctaaggttattggagttaaaagccactctttatttgcctcattatactgtttttcaccacgcatgtccaccagtttttgtaaagctttttgtgttccaaaaagcgaaactgtcttcggcagagaaaaagtctccttatctgaatttttcttgcttgacattttgattatacttcatagtcaaacatataaaaattcaaaataaggaaactattgattctggttacgacttaaaacctatttattgcattcactgccagtgtatatctttctacctttttcactatctgatgtctttcactaatatcgccatcaattcattcacgtcgattggctttgctatatgaccattcatcccagatgcaatagcctctctcttatcttcttcaaaggcacttgctgtcattgcaatgataggtatacatgccttatctttatctggcaggtgtctaatttcttgtgttgctttatagccatccattttaggcatctgaatatccattgaatgtatagtcacaaaagccaaagagacagtaaaattgccattgtacctgtccctctggttcaccaaactgcaaaaaggcagcctgatagcacagcggcttcttaaaaattcatattgatttttctgtccgtcgtgctataatcggtatataccgaaaacaaaggaggatgtacccatgccaagaccgccacggtgccgtcgtatttgtgacgcaccacaagtcgataccttctaccccaacggatgtggagatagtgagccgatcctgctgacgctcgacgagtacgaagtcattcggttagttgacttggagcaacaaacccatgagcagtgtgctgtgcagatggatatttcccgttctaccgtgcaggagatttacgaaagcgcacggcgcaagatcgcagcgtgtcttgtccacaggaagccgctgcacatcaccggaggaaactatcgcatttgcggagggcaggaggcagcccattgcggccgtttctgccggattcagagaaccaacacagaaaaatccaataaaaattgtaaaggagattccattatgaaaattgcagttacctatgaaaacggt

SEQ ID NO: 588 - DNA, 8668 bp, unidentified
  source 1..8668: mol_type = unassigned DNA
ttaaaagccggtaggcggcacatagtaactggggatcgaggctgttttctgcacatttgcctgctggcgcagcgctgaacgggtcacctctgcccaagaatactgggtcatatactcgccgcgataggaattggtggccgagcggctgccccgcaggaaattgtaataatcacaatccaccttgctggtgtccagcgccagtgtgctgcggccgcggatgagcaggccggtaacacctgcatcctccagcgtatggctcaggtcaaagatcagattgcggagatggctgtgcagcgatgcggtgtcgggcttatcctcccacagcacggccagcatttcgccgttggtgcaggtggcaccattgcgatccaccagataggccagcagctccttgctcttgctgcgcttgaaggccaaagcgcgcccgcccacgaagatctcaaaattgccaaagcactggatcttgatgccgacaggggcattctccggcgggtagcgcagatgctccagcacattgcgcacatctgcctcgtttgcaggcttgagtaaaaagccgctcacgaagatctgcagcgcttccagcgcatactccgggtgctctgttaccacaatgatgttgcagcgcggctgcagcttctggatcatgcgcgtcaaagcaagcccgttcatgccgggcatttccagattgaggaaagccgcgtccatcggcccctgacgcatccagctcagtgcatcctcggtcgtcatggcgctgatatagtcacagtcgggtgcaacgcggcacaggatgcggatcagcgagttgattgcaagctgtccatcatcgacgaccagtatcttcattcgtacacccccgcaagtttaccatacatgttccctgtttcagtttaacactttgtcctttgattcgcaagtttttttgcacaaaaagccagaagctccacacttctttacaaaaggacgttccttccccatccgtttcctcacgaagcagctggctgaaagaggcatctttcccattttcatttccggcagtcaaagcaactatacaagatactctgtgccatccagtccggtcagtttttgtgctgttgtttgtcccacacgggtgcagagccgctcatacgcctgccgcatccgggtagggcgcgaggtgcaattgtgcgcatccgaagagaccgcgtccaccagcccggtcttgacccagtgctccagccgcatccgctgccagaagccgctgtccagcacagccgaacagttgatctggcagcgcagccggtactgtttgtgcaggcgggccagcaggccgtgctgtgcaaggcagggataccgctcaatgtgggccaccagaatgcggtaacccgcacccgtgatctcctgcagagccgtttccagctcctttgccgttatgttcggcacaaattccagcagcacccagccggtatctcccaaggtcagcagctggcgctggactgccgcatatcccgtcgcaggggtatacagcaactcagagccgtgctccagcttcaggtcgtagcctttttgtgtgcagtatgcgcgggccagcgccagatgccggtcatagacttcctgcgggaagtgttccatgcccggcgtactgtgcgaggtagcaaacaggtgccgcacaccgtctgctgccgctgcatccagcatggcatacatttcttctctggtctgcgcaccatcgtccacgccgtagacgaagtgcgcatgataatccgtaaagccgctcatttcttttccgcttcgtggctccgtttataatactttctgtaataaccgtactttccatactttgagtaggatttgtagtacttgcggcccatatagttgtcgtagtccacctgattgagcacggtgcccagaatggggcagccggtctgctcgatctgctgcttcacgtccagcagctcctgacggctcacatcgttgtagttcactgcgatcagggtgccgtcacatgccttggcgatctccgccgcatcgatgaccacgcccaccgggggtgcgtccacaatgacgtaatctgccattctggccagcatatccagcagttcggcaaaatggctgttggtcagcagcgccagcgggttgggcacatcgcggcccaccggcaccatgatcgcgttggggatgtcggtctggtagatgacctcatccatgcccaccataccggccagaaaatgggagaggcccttaccgtcgttgcggccatcctcatatttcaggccgtagtcactgttgaccaagctgcggcgcaggtctgcgtccaccagcgccaccttgatgccgcgctgtgccagcgtgcgcatcaggttcatggacagatagctcttgccctctgcagcatggcagctggtgatcatgatctttttgacactcgcacctgcaaaggagaggttggtgctcagggtattaaaggcttcatttcccgcataatccagagccggaaattttgtgatcttcagctgtttcatgctttcctcccagagctgccgcccacacggcggcggacatcattggcaaaccgcttggtgcggcgcttgaactcgcttttctctttcggctgttcgccagcatcggccagcgggatcgatgccagcacgaccatgccggtatacttgcggatatcatcggcagacttgtaggtatcgtccagcatggtccgcagcaccaccacggcgcaggccagcacaaagcccactacaaagcccagcaggatgttcttggccttgttggggctgaacgggttctccggcacacgcgcagaagacatcagggtgggctcgtccgtcttcatcttttccgagatgtactttgcgcccacatccgcatacttgtttgcgatcgctgctgcttcttccgggtccgggttcgtgaccgtgatatccagcatacgggtgtcgctggtgttggtgacagacagcatactggccatatcggtgtaggtgtaatccagatccaggttgctgatgaccttttcgtggacttcccacatttcaaagaccttgatgtaatcgctggtcagctcgctgccgacctgcagatcggagaagttcagcaccgaatcattgcggctgaccacataaatggtggccgttgccttgtacatcggcgttaccagaaaaaacgtataaagcgccatcagtacggcacccaccacagccgtggctgcaatgagcgtccagtgggccagcaggcccatgaacagttccagcagatcaatggtatcttcgtcctgttccggctgtgccgctaaagctgtgcgctccttcataaaagtatcttgctgcacgatttcactccttataaccttataatactgccgcccatgcggcccgggcattgcgccctttcctctgtttttctgaatcctatacgccaaaaatgcggcgttccctttttcatcagggagcaccgcagaacatttctagttcttagccctcaatggtcttcacggccaccagaacgaagttggaaccatagagcttgacctgacggcccttcaggttcaccacgatcttgccatccacgaccttaccgggcacagtatagtaggtataggtcacagtgccgtctgccttcgtcttgggcacagccaccagaacggtaacttgctcgttgtcctcgtaagcagcctcaatgaccttggactcaatggtcagcttaacatttgcagcgtcgagcaggttagaggtctgcatctcaaaggcctgcgttacagtaacatctatagtcgtcttcttttctttcgaagcgcccgcagccttctgcaggtctgcatcagaagtgatgtcctgcaggacttcctcgacctgagcggtatcctccttggcagtgaccttcacatcgctgacaatgcccagaacaccggtgacggtagcagaaccgctggccttgacctcatctgccacagtcttgctgggcgttgctgccagaacagacacacccatgcccacgaccatagcagcggtcagaacagcgctgataactttcttcataatgaagatctcctttcacttcaagccgcactccccaagatgctgctttctatcgcaaatgcttttcaacatttacatcattcttcaacaggctcccagaacagcgtcagaaccgctttctggatggaagcttcggtcggatagaactcggtgaatccgtcctctgccaccttgtgttcgccttccagtgcaatggcaggttccacagtatcgtcctttgcggcccacacctcattgaccagctgaccctttgcaaggtcggtgaccagataaggctgcagcgcatcgtacacctgtgcggtgaactgctgatcctgctgcaccctgctttccagctgtgcggaaagctgtgcaagatactcctcctgccgcaccatgcgggcttcgttggtgccttcgccaatatccatgcgcctgcgcacaaaaatctcagcctgatcgccctgcagcgtcagggtagctcccttggtcatggccgggtctgctgcggagaaatcatcctccagcgtcacggtcacaccgcctgcaaggtcgttcagcaccgagatgccgtccagactcatagccagatagaaatcaatgttttccccctgcatcaggcgggacactgcatcacgggcatagccgcagctttcctccttgccatcgccaaagccatgggcaaggctgatctgcatctgagtggtgcccaccggattgcccagcatgccaagcaccgtcacctctgccatggtgtcgcggtcgatcttgagctgacggaccgtcttgtctttgctgtctatcacaatgagccgctgaaaatccgcctgaccgccctgataagagccttctgcttccacctcgctgtcatggtcgatgcccataacaaggatggtggtcagatctgtgcgcctgcggtaggtcacgccgtccacttccatggtctcagcggtctcctgcggcagctccgtccgggtctccggcttttggctgcgcttttccagccagcttccgcccacaaaaaacagtacagctgccagcaccagcacagccagcgcagcagcggcaccacgatgttgtttttgtctgttcaagcgggtaagcttccctcttttcttcggaatatagttttctgcgggaaggtctttccattgccacagaaagatattccttggcctattatatcgtcacaggtgtgcaactgtcaatgtattttcgttattttccggcaggaaatttcgcattttcagcctttagggagccacagataaacacaaaccccggccatgcagagttcatccgcacagccggggccaattggtattttatttgatatccagttcaggcggcacatcgatctggtccgagacatacttgccgttctttttgcgctgccgcacgcactccgtcagcagatattcgatctgcccgttcaccgagcggaagtcatcttcggcccaggcggcaagggcatcgtagagcttcgcgttcaggcgcaggggcacctgcttttttggttctgccatcagtacaggctgccgctgttcacgatgggctgggcatcacggttgccgcacagcaccaccagcaggttggagaccattgccgccttgcgctcgtcgtccagctccactaccttgttctcattcaggcgttcaagggccatttccaccatgcccacagcaccgtccacgatcatcttgcgggcatcgatgatggcacttgcctgctggcgctgcagcatcacggctgcgatctccggcgcataggccagataggtgatgcgggcttccactacctcgatgccggcctcggctacattcttctggatctcgtcccggatgcgggcggctaccacctccgaggagccgcgcagactgccctcatcggctacgccgtcgccggtggtgtccacattgggagccacatcataggggtaaacgcgcaccacattgcgcagagcgctgtcgcactgcagggagaggtactccttgtagttgtccacattgaatacggcctttgcggtatcggtcacgcgccagatgaccgcaatgccgatctccaccgggttgcccagacaatcgttgatcttctggcgggagttattgagggtcatcattttgagcgagatcttcttgctggtcgattctgcggtctggggactgctgttgcctgccttaagcagggccgccatgccggtttcgccgctgttcacatcgccgctctggctcagtttggtgccagctgccgggttcaccgcggtgcagaaggggttcacccagtaaaacccctgtcccttcagggtgccgatgtaatcgccgaacagggtgagcaccagtgcttcctggggctttaacaccttcaggccgcagagcaggaagatgcccgccacccagtatgcgatggacaggatcgtgagcaggatgcccggaaacaggctttcgtccagcagaatgatgctgtagaaaaacagcaggacggtaacagcatagcccagcagggtgagcagcagcatgaccatgccgttctttttggtctgcagaattttctcttccataacagttccctccttcacagggtgcggaagcgtttctttatgatatcaaaataatatcactttatatcattcttgtcaagtcctccgcaggcaaaaaagagccgccgcacaaacactgtgcagcagctcctttttgtttatctttttataatgtaaggggcacttgctctcaggcgaaggtcagcaccaccttgccagcgccgctgttacggtctgcaagggtatcgaatgccttctggaagtcctctgccttgaacacatgcgtggtgatctcatcgacctctttcaggtggtcaggcaggatcttgaccacctcggggaacttctggtactgatgacgggtacccagaatggtcagttcctttgcgttgatctccttgaagttcacggggatcggctccttgccaaaggtcatagccaccagacggcctgcgggagaaagctggctggttgcatgtgccagcagtgcgggaacgcctgcggcctcaaagatcacgttgacaccctcgccgtcggtcagtttgttgatgaacgcatccagatcttccttcatcgggttgatgctgtaatctgcgccaaagtcctttgccatggcaaggcggctctcgttcggctcagacacgatcacggtagcgccgcgcgattttgcaatgttggcaacgatcaggccgatggggccgccgccgtgcaccagcaccacatcgccggggcgcacatcgccgcgccagtttgcctgcaggccaatcgtgaacggctcgcacagagcagcctgctgataagtcatcttggaagcatcgtactcatacacctggctgcgcggcatgaccacatattcctgaaaaatgccgtccacgatgcagcccagaaccttcagttcacggcagacattgtggtggccgcagcggcaggcatagcacttgccgcagtaggtgatcggctcaaacacaacacttgcgccgggcttcaggtcggtaacaccctcgcccactgcgatcacctcaccggaaccctcgtggccaagcaccacaggatactttgcatacgggttgctgccatgatagacatgcacatccgagccgcagatgccggcagcgtgcaccttgacgagcacctgattcggctccttgatctcaggcatagggcgctccaccagctgcatatcaccagggccatttacaacaattgctttcataatcatgttcccctttccaaagcttcagatacccgggcaggacaggaatccgccatccacggcaatgacctggcctgtgatgtagccagacatttccggatcagcaaagaaccgcagtgcacccaccagttccttcgggtcgccaaggcggcccatcggggtgcggtggatcacgttccagtagcgctgggtgtaggaaccatccgggttcacatacatgtcatggttcagcggcgtgaggaagtagccgggtgcgaccgcattcacacgcaccttgcctgccgtgttggacaggtagttggacagccacttggtaaacatatccacagcggccttgctgcttgcgtatgcaggcaccatgctcagtgcatcgtaggctgccatggaggtaatgttgatgatggagcagccatcgcggcccaccatgttcactgcaaacacctgacatgccatcacggtgcccagccagttcacatccatgacgcgcagcagcttatcgctgtcgatgttgaacagggtacgggacgaagccagaacgcgggccttttccgcggccagatctgctgcctgcggatctaccttgacgacctctgttgccttttcgtcgcctgcggcataagcttccgaggtggtttttgccagcgggtcctgaatgcctgcgcagttgatcagcacttcatagctgccaaagtgctgcaccacagcatcgcgggccttttccagcgaagctttgtccgtaacatccacctggaatgctgcggcatcgccgccagcctgttcgatctcgcaggccaccttctggcctgcttgaatgttaaaatcaagaatcgctacccggtatccggtctttgcaaactccttggcaaaaatgctgccgaggccgccgccggcaccggtaatcactacagtacggctcat

SEQ ID NO: 589 - DNA, 8687 bp, unidentified
  source 1..8687: mol_type = unassigned DNA
ttagttcagcagggtcagctcggtctcaggatcgaacaggtggatcttatgcgtatccatagccatggtgaccttgtcgccgcggcgggacttggaggtcggggcaacgcgagccatcaggttctggcccttgtaggtcaggtacagatagatctcagcgcccatcagctcggaaacttcaacctcagtatcgatatggctggaaggatgcttctccaggaactcttcgtcatccttcatatcctcaggacggataccaaccttcaggctcttgccaacgtaagcggccagtttgccatcggcggtcttttcctgcggcagggggatcacggtgccgtccagatcgacgacataggtatcgccattcttctgcagggtgccgtccaggaagttcatctgggggctgccgatgaagccggcaacgaagatgttgcaggggtaatcgtacaggttctgcggagtatcgacctgctggatgacgccatcacgcataacaacgatgcggtcgcccatggtcatagcttcggtctggtcatgggtaacatagatgaaggtggtagccagcttcttgtgcagcttgatgatctcggtacgcatgctggtacgcagcttggcatccaggttggacagaggctcgtcgagcaggaagaccgccgggttacggaccattgcacggcccagggcaacacgctgacgctgaccaccggacagagccttcggcttacggtcaagcaggtgctcgatctccaagatcttggcagcctcacggacgcgcttgtcgatctcgtccttgggcatcttgcgcagctccagaccgaaggccatgttcttgtaaacggtcatgtgcgggtacagagcgtagttctggaagaccatcgcgatgtcgcggtccttcgggggaacgtcgttgatcagacggtcaccgatgtacatctcgccgccggagatctcctccagaccggcaatcatacgcagggtggtggacttaccgcagccggaaggaccgacgaaaacgataaattccttatccgcgatttccaggttgaaatcgggaacggcagtaacattgccggggtaaactttcttaacgtgacggcagctaatggaagccataatgctcatcctccaaatgtattcagtggtttcagcccgtgtagagggggctgtttctgttgacatgattataataacaggttataatctatttgaaaatagcattttattgatatagaggtgtcgaaattgatatttgacccggaaatttactgcaccgctgccgaaacggcggaattggacggcacagcgccgctggcgctggccggagacggcctgtgggtgggggtgctttcccgcggggcgtgcctgctggacggcgttgaccgcccgggccaaagcggcgatattctgctgggccctgcccccctggtgctgacgccgcagagcgactgccatctgctggccgtgcggctgaccggccactgcacggacgcctacttattgcaactgggggcggcgcgctgggcggacggtgctgcctgccccggcgcggcggagctgatcgcacagctgtgcggcgcgcagacggcccccatggcctacgcgctgctctgcgccgcagccaaggccgacgagaccgcccgtcccctgccgccgcttgtggccgaggccgtggcggccatccgccagaattatatggcgctctacggcgtcgaggagctgagcgagcagctcggcgtgacaaaaagccatctggtgcgcgtctttaagcaggagatgggggtgccgccgggcaagtacatgacgaatgtgcgcatcgaggcggtcaagacgctgctgctgaccgatgagtacaatctggacatgatcgcgggcctgacggggttttcgggggccaattatctgtgccgcgtctttaagcgggaggtgggcctctcccccgcggcttggcgcaccgccgccgcacccctgcccgccgtacccaagctcccgccgagaagtcaggagatgtatgtgtaaaagaaaggcttcccccttgggggaagctgtcagcggccccgcccgctgactgatgaggggcaaccttgccattgcaacccgtttacgggcagctgtggcagacccgtccctcatccggcctcggtcggggcctcggccaccttcccccgagggggaaggcatacaaaacaaatgcccgatacggctcgtcaccgcatcgggcattcttaactttatgcagctttattccgcagtcttatacccgtccgggttgtggctctgccagttccagctgtgggcgcacatttcctcaatgccgtactgggcctcccagccgagctcacgcttggccttggagggatcgcaccagcactcggcgatgtcgccggggcggcgcgggtcgatgacataggggatctccttgccgcaggccttgctgaaggcgttgatgacgtccagcacgctgtagccgtggccggtgcccaagttgcagatgaacaggccgggcttctgctccaactttttgatggcagcaacatggccgcgggccaggtcgacaacatgaatgtagtcgcgcacgccggtgccgtcgggggtcgggtagtcattgccaaagacgtggaccttctccagcttgccgacagcgaccttggcgatgtagggcacgaggttgttggggatgccgttggggtcctcgccgatcaggccggacggatgcgcgccgatggggttgaagtaacgaagcagcgcaacgttcagctcggggtcggcgtggcagcagtcagtcaggatgcgctcggtgaacaccttcgtggtgccgtaggggttcgtggtgccgccgacggggaaatcctcgcggatgggcacgctggcggggtcgccgtagaccgtggcggaggaggagaagatgatgttgtggcagttgtggcggcgcatgacatccagaatgttcagcgtgcaggccagattgttggagtagtactcgatgggcttggaaacgctctcgccgacggccttgtaggcggcgaactggatgacacagtcaatgtcctcgttctcggcaaagatcttctccacggcgtccttgtcggtcatgtcggcctcgacaaaacggaagtccttgccggcaatcttcttgacgcgggcaagggcctcggggcaggagttgtagtagttatcggctacaacgatgtcgtaccctgcggccagaagttccacacaggtgtggctgccgatgtagccggcgccaccgctaaccagaattgccataacagtcgtctccttatgttatatgatattgttgcgtgcgaaccgagcggctcgcctctctttgcttgtattctactctttctgcggagtttctgcaataggagtttttgattctgatttgcctttttgttgcctgttttgccgccgtgcgggcagcccctgctgaatgcggcggtaggcggacggcgtgtgccccgtggcagcgcggaatttctggctgaaatacgcgccggagcagtagcccatctgcgcggcgacctcgccgggggatgccccgcgggccagcagctgggccgcgtactcgatgcgcatggcggaaaattcctccatggccgtgcggtggagccgcgctcggaacgcctgctgcagctggggccgcgtgcagcccagcgccgtgcagatgtcgtcgatcttcagttcatgcgcaagattttcggcaaaataggcgcgggcgtcctcgaccagcgcgttctggcggcgctcccgccggacgcgggccacggggcgcttggtgcggcggcagcggcgggccagcaaaatcagcagattttccagatggatgatgaactgttgcatcgcgccgaagggcagctcctcctttaagacaggccgtccgcccggcacgggggcggcgtcgaacagctcgttggcggcatttgccagccagttcaggtcatgctgctcggcaggctccgtgtgcagcatcgcgccgcggaaacggtccatggccgcgccggtgcagtaaaagtcgatgcgcagcgtctcgggcgggacctcgccgacggtggtcatagcaaagacctcccccggctggtggaacagcagtccgcccgcccgcagcagcacgtggcgggcatcgcagcgttcctcaatggtgccgctgcgcacaaagaccagctgccaggcctgcgtctcgctgggcgggaatgagtcgtccgcgcgccactccgacgcatgtgccgccggaatcgcttcgacccgcagcggaaaggtatcgttcagcatgggtgtgacctcccttctggggcgagtgcccgaaggcgtgtagggaggggtcttgacccctccgcggggcgtcgaggacgccgccccctacaaaacctggcgcaaacttgctgtagcttgtagggaaggcatttatgcctcccgtgcactgggcggctggcgcaaagctcccgggagggataaatccctcccctacaacaatttacaccgctaccgcgcccggccaattctcgccggcctccgcactccccgtttccccgtcggctccgtaagagaaaacgccgggggtcatgtcggccagcagggggaactgcgcaagctcggggcaggtgtcggtcagccccagacagtaggccgtcagcggactgatctcctttgtgatggcgtcaaaccggcttgagccgtcgtcctcgtaggtgctcagcataatatcgccggggtaggtgtcggccacatagctgacaagtgcctcgtcgacgtaagggtcgctgctgccctcatacaggtcgggcgcgccgaacagatgcaggatctcgtgggcgtaggtcgccggggactccgcctcgccgtcggtgtaggcgtcggttttgtacaggcagctgtattcataataaaagctgtcgccgtcgtcggcgtagtgagccatcgtgaaggatgtcccgctgatgggcaggaagaacaaaaacgcgatgtgccgggccccgtaggcagccagacggctgtcggcggccagcgacgcgcacagcgtatccatctcgtcgagaaaagcggagctttcctcggaattttcgccgccctgcatggcggactgcacaagataactgcgtgtcagcgttgaatcgctgccgtccgcgctgcgatcacagatcagattcaccgcggcctcgtagcccgcggcctgctcggtgatccagtccacggccagctgggtgcgctgcacggcggcagcgcggctctcggcgtcccaggtctgcccgtgggcggcgtcgttcaaaaacacgttgacgagcacggtggcatcggtcagcagtgcggcgctgccgtaggccttctgctcctcggtaaaggtgggcaccggctccggcgtcggggtggcggcggggctttcggcccggggcagctctgcgggataacgctgcaccgtgacgcgggccgagcagctgcacagcagcgccgcggccagcaccagggcagccagttttctgtacatggtgcgccccttaaatgtccagcacggcactgccgtcgtggtcggccagctccagcgtgacctcgcggccatccaggcggccatcgacgagcgcgtcggagacgggatcctcaatggtcttgcggatcgtgcggcgcagctcacgcgcaccgtatttggtggagctttcggctacgatgtccgccagcgcgggctgcgtgtagtgcagcgtgatgccgtgcgcggccaggccgggcttgtactcgtcgagcatgagcgcggcgatcttctcaaggtcttcctcgctcagcggcttgaacgtaatgatctcgtccacacggccgatgaactcggggcgcaagaactcctgcagcgccttcatgctgcggtccgcgctggcgacctcggcctttttgccgaagcccgtcgcgccgctctggtcggtggagcccgcgttggaggtcatgcagatgaccgtgttcgagaagtccaccgtgcggccctgcgcgtcgttgatcttgccctcgtccagaatctgcagcaagatattcataacgtcaggatgtgctttttcgatctcgtcgaacagcacgacgctgtagggatggcggcggaccttctcggtcagctgcccggcctcgtcgtagccgacatagcccgggggcgagccgatgaggcgggacaccgcgtacttttccatgtactcgctcatgtcgatggagatgagcgggtcaacggtgtcgaacagctggctggccagctgcttgaccagctcggtcttgccgacgccggtggggccgacgaagataaagctggccgggcggtgacgaccagacaggtcggcgcgggcgcgcttgatggccccggccacggcgtggacagcctcgtcctggccgatgatgtgcgccttgagggcatcctccagcccctgcaggcggccatactcggtctctttgatcttcacagcaggtacaccggtccaaagctcaatgacctgtgcgacgtcgtccatggtcacttcaatttccgcgaccttcagctgcagggcgggcagcttttcgcgctgcttcgccagatcggtcttgaccgcggccagtgcctcgtagtcgatggcagcgtcctggccgttctgcggctcggggttctccagttcgtgctcgcgggtctccaaatcggccacggtgcgctgggtctccatgagctctgtaatttcaggatggcgcaggttgcagcaggcgcaggattcatccagcaggtcaatggccttgtccggcaggaaacggtccgtgatgtagcgttccgacagcttgacgatgctcgtcacgatggggtcggacacacggacgcagtggtgcttttcatagtagacgcggatgcccttgatgacttcgatggtgtccagcagcgacggttcctcgaccttgacgggctgaaaacggcgctccaacgcggaatccttctcgatatacttgcgatactcggcaaacgtcgttgcgccgatgacctgcatctgcccgcgggacagcgcgggcttcatgatgttggcggcgttcatagagccgtcggagtcgcccgcgccgacgatggagtggatctcatcaataaacaggatgatgttgcccgcagccttgacctcgctgatgaggcccttgacacgctgctcaaactggccgcggaactgggtgcctgcgacgagggacgtcatgtcgagcaggtaaatttccttgtcctgcagacgcgcggggaccttgccctcggcaatgcgctgggcgatgccctcggcaatcgcagtcttgccgacaccggcctcgccgatcaggcaggggttgttcttctggcggcggcacaaaatctggatcgtgcggtaaatttcgcggtcacggccaatgatgcggtccgtcttgccgtcgcgggccttctgggtcaggttctcgcagtaggtctcaaggaacttgcggcggggagccttttccttcttgccgtttttgggcttggtgtcgtccttattctggcgcgcaccaaagccaaacgggaacacggggctgccgcccgggacaaaatcgtcctgcggggcgggctcgtcaccggcgtcggtgtcgtcgccgttcatcatgggggccagcatgccggagtcggaggcctcctgcaaaaagctggacatccgctcctccatgttttccagatcctggtcggacatgccgaactgtttcatcagatcatccacaggctggatgtgcatggcacgggcgcaggtcaggcagtagccctcctgcacggtcttgccgttttcaagccgctgcacaaacacgacagcgggacgtttttggcatttaacacaaagcatttacttcacctctatgaaaagtgcccgataagaggcacatgggattgcgataaattgttgtagggggcggcgttctcgacgcccggcgggcggataggaaatccgccctacgtagggcgggcagtcccctgcccgccgcaccgtagctacactactattattaaacaaaccctgccaaattgcaagttttggcggggcttgttcagaatttgtttaataatggagcaaaaacgggttgaacgcaccaaaaaggctgtacccgacgctgcgctgcaaaacgccggtggtcagccagtcgatctggccggtggtgatgctggcggcgaaccagagcagcagcgccagcagccagcagtcgaacgcgccggtcacaaggcccagcaccagacccagcagccggttggcgccgcccaccagcgggataagattgacgccgcgcagcagccgcaccagcagggcgaacacccagcgcacgatcatgcagagcagcacaaacagcaccgcctgcaccagcggcaggaaaagcggctccagcagggcgttgatcttttcgggcagctggtccccggcagtctgcagacccgcggccagcgcggcacggatggattccggcagaaagtccagcccctgcaccgcagcggcaatatcgccgcccgactgtgcgacggcctgttcgacccgggtggagacggagtcgctgaaaaagctaaggtagacttccggggccagcgtgcggctgccccaggaggcaatgccgacgcccagcaccgcgccgatcagctcggtcagcccggcgagaaagcccttctgccagcttttgacagcggcaaaggaaaatacggccagaaaaataaaatcatagacaagtgagggagaaaaagacat

SEQ ID NO: 590 - DNA, 5527 bp, unidentified
  source 1..5527: mol_type = unassigned DNA
atgggaaccgttttcaataaaaaggagcttttggtcctcttgcaggattttcactgccttacggggctgcgctccgccgtttttgattcgtatggaatcgaagtgcttgcctatccgccggaactgccagcttattgccgcttgatccgcagtgtgcctgatggcaagaccggctgttacctgtgtgaccaggcggcttgccgcaaggcaacgcggcaaaagcagacgatcatctacccctgccatgcggggttgatcgaagtgatcacgccggtccaaatcgatggtgctgttgtgggctttttgctgttgagccacattgtacagggggccgatgagcagagcgagtggagctatgcgcaaaaatgctgctcggcttacgcaattgataaaacggcactgcaaaaagcctataatgccttgccgcgcacgccctatccggtgctgaaatcagcagcggatctgctggctttggcggcggctgcattgtaccaaaagggactgacgcggctggcagcgggcagtgcgcaggaaaaactgagccactacctggcgaaacatctggatgagacattgacaaacgaaacgatctgccgtgatctttcgttaagccgtaccgggctgtactatctttcccggcagctctatggctgcggcatcaacgagcaaatcacgcatctgcgcatccaaaaagcgatgaagcttctttgcgatacgaatctgtccaatgcacagatctgccagcagatcggattcctggatgacaattacttttatcgtgttttccgtaaacaaaccggtctgacaccacgccagtaccgtgattctatcttagcagatacatcaaagactgagtagagacgattgttttcaatactggattattgttcaaacaattctgatggaagcggcaatgttgaattgtggccggtgacgtgctataataaacctacatacggtaagccggcacggcgtaattttgaccgctgccttacggaaaattcgcagctgcggagtataactgttatgaaaaaatataagatcgcggtggccgggaccggctatgtggggctttcgattgccacgctgctttcccagcaccatcatgtgacggcggtggatatcctgccggaaaaggtcgcattgatcaacgcgcgcaaatcgccgatccgggacgattacatcgagaaatatctggctgagaaggagctggatctgaccgccacactggacgcaaaggcagcctacgccgatgcggactttgtggtcattgctgcacccaccaactacgacagccagacccagcactttgacacctctgcagtggaggcagtcatccgccttgtcacggaggtcaatccaaacgccctcatggtcatcaaatcgacgattcccgtgggctacacggtgtcggtgcgggaaaggctcggcagccggaacatcctgttcagcccggaatttctgcgagagtccaaggccctgtatgacaacctctacccgtcccgcatcatcgtcggcaccgatccgaaggatgcgcaccttgtcgcagccgcccacgaatttgcggcactgctgcaggaaggtgccatcaaggagaacattgatacgctcttcatgggctttaccgaggccgaagccgtcaagctgttcgccaacacctatctggcgctgcgcgttgcctatttcaatgagctggatacctacgcggagagcaagggcctgaacacgaagcagatcattgacggcgtatgtcttgacccgcgcatcggcagccaatacaataaccccagcttcggctacggcggctactgcctgcccaaggacacgaagcagctgctggcaaactacgccgatgtgccggaaaatctcatcgaggctattgtggagtccaaccgcacccgcaaggacttcatcgctgaccgcgtgctgaagctggccgggtactacggctacgatcaggaaaatgagtttgacgaaagccgcgaaaggcccgtcacgatcggcgtctaccgcctgacgatgaagagcaacagcgacaacttccgccaaagctcgattcagggtgtcatgaagcgcatcaaggccaagggcgcacaggtcatcatctatgagcctacgctggaggacggcaagaccttcttcggttcggcagtggtcaacgatctggacaaattcaagcggcagagtcaggccattctggccaaccgctacgatgcctgcctcgacgatgtgcaggacaaggtctacacaagagatctgttcggcagagactgaaacgcctttcttccgctttttgacagtggagtaaggctctcaatgccattaccgcacaatatccctgtgacttttaaagagaggaacacctgttatatgaaatatgattatctggtagtcggctccggtctgtacggtgccatcttcgcccatgaggccaaggcccacggcaaatccgtgctggtcgtggataagcgccccaacattgcgggcaacatttataccgagaacatcgagggtatcaacgtccataagtatggtgcgcacatcttccacaccaacaacaaaaaggtctggaactatatcacccggtttgccgagttcaaccgctttacgaactctcccgttgccaactataagggtgagctgtattcgctgcccttcaacatgtatacctttaataaaatgtggggcgtcgtcacaccggaggaggcagccgccaaaattgaggagcagcgccgtgagatcacccacgagccgcagaaccttgaggagcaggccatctcccttgtaggccgcgacatttatgagaagctcatcaagggctacaccgaaaagcagtggggccgcgattgcaaggacctgcctgcttttatcatcaagcgcctgcctgtgcggctgacctttgacaacaactatttcaacgcgctgtatcagggcattcccatcggcggctacaccaagatgatcgccaatcttctggacggcatcgaggtgcggctgaacaccgattacctcgaaaacaaggccgcgctggacgcactggctgacaaaatcgtctacaccggcccgattgacgcttattttgactacaaactcggcacgttggagtaccgctccgtccggtttgagaatgagctgctcgacaagcccagcttccagggcaacgccgccgtcaactatacggaccgcgagacgccgtggacccgcatcatcgagcacaaatggttcgagttcggcaaggacgagaacggcaacgacctgcccaaaacgatcatcagccgcgagtattcctctgagtggaagcccggtgacgagccgtattaccccgtcaacgatgctaaaaacggcgcgctgtatgccgagtacaagaagctggccgacgccgagccgaaggtcatcttcggcggacgcctgggtgagtacaagtattacgacatggatcaggttatcgccgccgtgctggaccgctgcgaaagcgagctgcactaaagtacagccaagcgaaagcacaaaatccaaaaggcagcaaagcagaccccaaaagctaaaatcggggtttactttgctgcccttttttatttgctcaatccgctggcgccgcttgccacaacgccgccgtccataagaatgtctgctccggtcaggaagcccagccgctcatccagaagaagcgcaaacaaagcggcgatttcttccggctttccgttgcgcttgagagcggagtgttttttgaatacatccgcctgcccgctttccagtgcgcccatcggcgtgtcaaagttgccgggtgtcacactcaggcaacgcacatttttctcgccaaagcgtgcggcatcggtcttagcaaaccaaattacaaaatgcttgctgatggcgtaggccagacccgggcgggcatccttaggggcaatgcctgcccgcgccaccagctttttgatgaatttttcacggtcggtgcgcgccagcttgtacgcacccttgggcatgacaaactgcggggcaaggtaggcgctcatgctggaggtgtcgatcacacagccgcccggcgccatgacctcataaaaggcatcgttgatattcaccgtacccagcgcattgccgcgcaaaatcttttcagcatcgcccatgtgagggctaaggcccgcaatgtgcaataccgcttttacttcgccgcattcggcggcgtgtttggccagcgcaaaacagctttcacggtcggaaacatcacagctgaacgcctcagcctcgccgcctgcactgcgcagatcgttgactgccttttccagcttggacgccgtgcgccccaccaaaatcgtgtaatatccttcttcacagacgagcttcgccgtggcaagtcccatcccgctgccaccgcctgtgataacgcaaacctttttcataataggcacccccttttctttgtgtcagtgcagggaatccagtgcgtggagatagcactcccactgctggtcattcatttgcataagcttgcagatagattcatacagcttcttcatgcgatttttccctcctgcttgagccatactgcgagatcatgcagtgtttccttgtagggacgcggggcaaagccaagctcattttttgccttggagcagtcaaaatggttgttgcgctccagattgtaaacggcaaactcggtcagcacagcgggcttgccggtcttggccgcgcgggcctccatctgcttggcggcaaaatgcgcaaaagacagcggcagataaaacaggcagccgcggcagccggtatcagccttgagcatctcacacagctccttcagcgaaacctcgtcattggaaaggatgtagcactcgcccttgcgcccgcggtcagcggcggcaatcgtgccagcggccagatcgcgcacatcgacaaggttaaacgaaccctgcataccgatgggcatctcaccgttcaaaatctggatcagcgtgcgggtcgtctgcccgatggcggggtcgttggggccaagaataccgctgggatgcaccacgcaggcattcagcccgtcagcggcggcgtccagcaccttctgggtcgccattgccttgctgcggctgtaccagccgaccacgcgatcatcatcgtagggaacaaagctgtatacctcgcggatgctctcgcccttaggcagctcagggatggcgccggtgctggaaacatagacgaactttttgcactccgggtgatttttagcggcgttcagcatgttttcggttccgcccacattgacggcgatgagcttttcactataattcgggttgatcgtcaccatgctcgcgcagtggatgcagacagtctggacgcccggctccacggcaaagaatttctcgcagtcctcggcattgcagaggtcaccctcaaagatttcgacggccttcggcataaattttacagcggggtcgcccttcagcacaaaagcgcgcacggcatcaccgcgctccaaaagctgtgcgcagacattagtgcccataaatccggcagcaccggtgacaagatagatgattttcat
